(19) United States
(12) Patent Application Publication
(10) Pub. No.: US 2007/0172831 A1
(43) Pub. Date: Jul. 26, 2007

(54) Schizophrenia gene signatures and methods of using the same

(76) Inventors: C. Anthony Altar, Garrett Park, MD (US); Jeffrey A. Brockman, Frederick, MD (US); Vinod D. Charles, Silver Spring, MD (US); Linda Jurata, Poolesville, MD (US); Yury Bukhman, Mississauga (CA)

Correspondence Address: DARBY & DARBY P.C., P.O. BOX 770, Church Street Station, New York, NY, 10008-0770, US

(21) Appl. No.: 10/873,426

(22) Filed: Jun. 21, 2004

Related U.S. Application Data
(60) Provisional application No. 60/480,100, filed on Jun. 19, 2003.

(51) Int. Cl. C12Q 1/68

(52) U.S. Cl. 435/6

(57) ABSTRACT

Compositions and methods that are useful for the diagnosis and treatment of schizophrenia are provided. More specifically, “gene signatures” are described that are characteristic of schizophrenia in an individual. The specific classes of genes that can be identified from these signatures are useful in that they provide the basis for identification of novel therapeutic protein targets for the treatment of schizophrenia, and provide potential diagnostic markers for schizophrenia and markers for evaluating the therapeutic response to antipsychotic agents.

### CROSS-REFERENCE TO RELATED APPLICATIONS

[0001] This application claims the benefit of priority under 35 U.S.C. §119(e) of U.S. Provisional Patent Application Ser. No. 60/480,100, filed on Jun. 19, 2003. The contents of the priority application are hereby incorporated into the present disclosure by reference in their entirety.

### STATEMENT UNDER 37 C.F.R. §1.77(b)(4)

[0002] This application refers to a “Sequence Listing” listed below, which is provided as an electronic document on two identical compact discs, labeled “Copy 1” and “Copy 2.” These compact discs each contain the file named “100M970.ST25.pdf” (670,208 bytes, created on Jun. 21, 2004). Pursuant to 37 C.F.R. § 1.77(b)(4), the sequence listing on these compact disc is hereby incorporated by reference into the subject application.

### FIELD OF THE INVENTION

[0003] The present invention relates to compositions and methods that are useful for the diagnosis and treatment of schizophrenia. More specifically, the invention comprises sets of genes referrred to as “gene signatures” that are characteristic of schizophrenia in an individual. The set of genes marked by the signatures provide the basis for the identification of novel therapeutic protein targets for schizophrenia, as well as potential diagnostic markers for schizophrenia and markers for evaluating the therapeutic response to antipsychotic agents.

### BACKGROUND OF THE INVENTION

[0004] In order to facilitate reference to various journal articles, a listing of the articles is provided at the end of this specification. However, the listing or citation of these or other references does not constitute an admission that the reference(s) is(are) “prior art” to the present invention.

[0005] Schizophrenia is estimated to be prevalent in up to 1% of the population. While small molecule drugs are used to treat the disease, these drugs all exhibit side effects. In addition, many patients are or become resistant to these treatments. The mode of action for these drugs is thought to be through antagonist/agonist action of G protein coupled receptors that mediate neurotransmission. These small molecule-receptor interactions may also be responsible for the negative or side effects of these drugs as well. The major challenge in developing superior drugs that treat the root causes or impairments in schizophrenia is the lack of identified biochemical process targets that are aberrant in the disease.

[0006] Biochemical studies on post-mortem schizophrenic tissue have to date not provided a comprehensive set of such biochemical targets that are amenable to drug discovery. Several brain regions have been implicated in the pathophysiology of schizophrenia, particularly the hippocampus, frontal cortex, and temporal lobe (Tamminga et al., 1992; Benes, et al., 2002). Biochemical changes within these regions include decreases in neuronal size, increased cellular packing densities, distortions in neuronal orientation (Arnold & Trojanowski, 1996; Byne et al., 2002; Harrison, 1999), alterations in various neurotransmitter pathways and presynaptic components (Beasley et al., 2002; Benes, 2000). Changes include findings from positron emission tomography imaging studies, which have revealed abnormalities of regional cerebral blood flow (CBF) and glucose metabolism in the hippocampus and prefrontal cortex of schizophrenic patients (Tamminga et al., 1992; Dickey et al., 2002; McCarley et al., 1999; Kishimoto et al., 1998). At a cellular level, cortical interneurons, hippocampal dentate granule neurons, and CA3 pyramidal cells have been most strongly implicated as being different in schizophrenia or bipolar disease. Unfortunately, these morphological studies provide little information about potential functional impairments or routes for therapeutic intervention using drug discovery methods.

[0007] An alternative strategy is the comparison of gene expression profiles within defined neuron populations from the brains of normal and diseased patients. A single study has combined laser capture microdissection (LCM) with T7-based RNA amplification to obtain genomic expression profiles from a neuronal population, the rat dorsal root ganglion (Luo et al., 1999; Van Gelder et al., 1990; Eberwine et al., 1990). The only similar study in on brain tissues identified gene expression in single entorhinal cortical neurons in schizophrenic and normal cases (Hemby et al., 2002). A down-regulation of various G-protein-coupled receptor-signaling transcripts, glutamate receptor subunits, and synaptic proteins was seen in the schizophrenia cases.

[0008] The advent of microarray-based gene expression profiling has allowed several groups to identify CNS gene expression changes in schizophrenics. These studies have uniformly used frozen blocks of frontal cortex, and revealed alterations in genes that encode for proteins involved in synaptic signaling (Hemby et al., 2002; Mirnics et al., 2000), neurotransmitters (Vawter et al; Bahn et al. 2001), myelination (Hakak et al., 2001; Davis et al., 2003) and energy metabolism (Middleton et al., 2002). However, the presence of multiple cell types within the tissue blocks used in these studies may dilute and mask gene expression changes otherwise seen in specific cell populations. The impact of schizophrenia or any psychiatric disease on gene expression within hippocampal neurons remains unknown.

### SUMMARY OF THE INVENTION

[0009] The present invention provides novel “gene signatures” that are indicative of schizophrenia. Another embodiment of the invention comprises a method for diagnosing whether a patient has schizophrenia. In yet another embodiment, the invention comprises a method for monitoring a therapeutic response in an individual undergoing treatment for schizophrenia. In an alternative embodiment, the present invention provides kits for diagnosing schizophrenia in an individual. In another embodiment, the present invention describes measurement of gene expression profiles of neurons extracted from the hippocampal dentate gyrus or CA3 region of schizophrenic, bipolar, major depression patients and controls. Amplified antisense RNA (aRNA) prepared from these samples is analyzed, e.g., by cDNA microarrays to identify disease-specific changes in gene expression. The dentate granule cells and CA3 neurons reveal robust changes in gene expression in schizophrenia relative to controls. Most pronounced are decreases in macromolecular complexes involved in mitochondrial function and energy metabolism (NADH dehyrdogenase, malate dehyrdogenase, ubininol:cytochrome c reductase, succinate dehydrogenase, cytochrome c oxidase and ATP synthase) and proteasome function (proteasome subunits, ubiquitin, and proteasome-specific ATP synthase). Genes involved in synaptic transmission (syntaxin 8, syntenin, SNAP 25 and drebrin), neurite outgrowth, and cytoskeletal proteins (GAP-43, cadherin-like 22 and contactin and RAB 33-A) are also consistently decreased. These macromolecular-specific changes in gene expression in schizophrenia demonstrate highly statistically significant decreases in expression level between the normal and schizophrenic data sets.

[0010] A second example describes experiments in which gene expression profiles of neurons extracted from the hippocampal dentate gyrus of schizophrenic, bipolar, major depression patients and controls were measured. Amplified antisense RNA (aRNA) prepared from these samples is analyzed, e.g., by cDNA microarrays to identify disease-specific changes in gene expression. Again, the dentate granule cells reveal robust changes in gene expression in schizophrenia relative to controls. These changes in gene expression are not observed with bipolar disorder or non-psychotic major depression data sets, or in dentate neurons of rats treated chronically with clozapine. In addition, these changes in gene expression in schizophrenia are not associated with patient demographics including age, sex, brain weight, body weight, post-mortem interval, or drug history. Decreases in expression level between the normal and schizophrenic data sets are observed in large, overlapping clusters of genes that encode for protein turnover (i.e. proteasome subunits and ubiquitin), mitochondrial oxidative energy metabolism (i.e. isocitrate, lactate, malate, NADH and succinate dehydrogenases; cytochrome C oxidase and ATP synthase) and genes associated with neurite outgrowth, cytoskeletal proteins and synapse plasticity. These sets of genes are useful in that they provide the basis for the identification of novel therapeutic protein targets for the treatment of schizophrenia, potential diagnostic markers for schizophrenia, and markers for evaluating the therapeutic response to antipsychotic agents.

[0011] The invention therefore provides nucleic acids which can be used collectively in methods of the present invention, e.g. for diagnosing or treating schizopherenia, or for monitoring a therapy (for example, the administration of one or more drugs or other therapeutic compounds) to treat schizopherenia in an individual. Such collections of nucleic acids, are also referred here as a “gene signature” and comprise collections of nucleic acid sequences that are demonstrated (e.g., in the Examples of this application) to exhibit robust changes in gene expression in individuals with schzopherenia relative to control or reference groups who do not have or exhibit symptoms of that disease.

[0012] In one aspect, therefore, the invention provides methods in which a gene signature of the invention is used to diagnose schizophrenia in an individual. Such methods generally involve obtaining a cell or tissue sample from an individual who is either suspected of having schizopherenia or who is at risk for that disease (e.g., because of a family history of schizopherenia), and detecting or otherwise determining the expression level for at least one gene (i.e., one nucleic acid) in a gene signature of the invention. The determined expression level(s) for the one or more nucleic acids are then compared to expression levels of those nucleic acids in an individual (which can actually be the average from a collection of individuals) who does not have schizopherenia. A substantial or statistically significant difference in the expression level(s) of the nucleic acid in the first individual relative to the levels of expression in an individual(s) not having schizopherenia then indicates that the individual being tested does have, or is at risk of developing schizopherenia.

[0013] In another embodiment, the invention provides methods (e.g. screening methods) for identifying compounds that can be used to treat schizophrenia. Generally speaking, such methods involve contacting a cell or tissue sample with a test compound, determining the expression in the cell or tissue sample, of one or more nucleic acids in a gene signature of the invention. The expression level(s) thus determined can then be compared to expression level(s) for the nucleic acid(s) in a control cell or tissue sample that is not contacted with the test compound. In these methods, a difference in the expression of the nucleic acid(s) when the cell or tissue sample is contacted with the test compound indicates that the test compound can be used, or is at least a candidate compound, for treating schizoprenia. In preferred embodiments of those methods, a neural cell (or more precisely, a neural cell line) is used. However, other types of cells or tissue samples can also be used.

[0014] In still other embodiments, the invention provides methods for monitoring a therapy or a “therapeutic response” in an individual who is being treated for schizophrenia. Such methods generally involve steps of determining, e.g., in a cell or tissue sample from the individual, the level of expression for one or more genes in a gene signature of the invention, and comparing these determined expression levels to level(s) of expression, e.g., in a cell or tissue sample not having or undergoing a therapy for schizophrenia. More typically, expression levels are compared to a collective average of expression levels in individuals who do not have and/or are not undergoing therapy for schizophrenia. Alternatively, the determined expression levels can be compared to a collective average of expression levels in individuals who have successfully undergone therapy for schizophrenia. In such methods, a successful therepautic response is indicated if the determined expression level(s) is (are) similar to the corresponding expression level(s) in individuals against which the determined expression levels are compared.

[0015] In all of the above-described methods, the “gene signature” nucleic acids can be any one of, or a combination of two gene signature nucleic acids described here. Preferred nucleic acids are set forth in Table 14, infra, and in SEQ ID NOS: 1-249. In preferred embodiments, expression levels for a plurality of these gene signature nucleic acids are determined is used. For example, the expression levels for at least 10, 20, 30, 40, 50, 60, 70, 80, 90, 100, 110, 120, 130, 140, 150 or more gene signature nucleic acids can be determined and used in the various methods of this invention. In particularly preferred embodiments, expression levels are determined for at least 14, for at least 28, or for at least 42 gene signature nucleic acids.

[0016] Another aspect of the invention is a kit for diagnosing schizophrenia in an individual comprising a plurality of nucleic acid probes. In this aspect of the invention, each of the probes contained in the kit specifically hybridizes of any one or more of the genes identified in Table 14. In yet another aspect of the invention is a kit for diagnosing schizophrenia in an individual comprising a plurality of primer pairs. In this aspect of the invention, each of the primer pairs contained in the kit specifically amplifies any one or more of the genes identified in Table 14. In preferred embodiments, one or more polymerase are used to amplify the genes. Preferably, the kits of the present invention further comprise a detectable label.

[0017] In yet another embodiment, the diagnostic methods of the invention comprise a step of measuring the expression level of any one or more of the genes identified in Table 14, infra, in an individual who is undergoing treatment for schizophrenia. The one or more measured expression levels may then be compared to the expression levels of the corresponding gene signatures described herein for individuals who do not have schizophrenia. A therapeutic response is indicated if the expression levels in the individual who is undergoing treatment for schizophrenia are similar to the expression levels (gene signature) derived from tissue samples of individuals who do not have schizophrenia.

### BRIEF DESCRIPTION OF THE DRAWINGS

[0018] FIGS. 1A-D is a representative photomicrographs of dentate granule neurons collected from human hippocampus. FIG. 1A depicts low (12.5X) magnification of the Nissl-stained section. FIG. 1B depicts high (40X) magnification of Nissl-stained section. FIG. 1C depicts high (40X) magnification of the tissue surrounding the dentate cell layer within the transfer film. FIG. 1D depicts high (40X) magnification of the dentate neurons embedded within the transfer film.

[0019] FIGS. 2A-C show scatter plots as follows: FIG. 2A shows scatter plots of gene expression changes in the dentate gyrus for schizophrenia of cohort 1 (n=8-10 per group); FIG. 2B shows scatter plots of gene expression changes in the dentate gyrus for bipolar disorder of cohort 1 (n=8-10 per group); and FIG. 2C shows scatter plots of gene expression changes in the dentate gyrus for depression cases of cohort 1 (n=8-10 per group). For each gene (black dot), the ratio of the average relative expression value in disease versus that for controls (n=9) is plotted on the y-axis. The x-axis is the average intensity for the specified gene in control cases.

[0020] FIGS. 3A-B shows the numbers of modulated genes identified in cohorts 1 and 2 as follows: FIG. 3A shows the number of decreased genes identified in cohorts 1 and 2 to the left or right of each circle, respectively (p<0.05;>25% decrease). FIG. 3B shows the number of increased genes identified in cohorts 1 and 2 to the left or right of each circle, respectively (p<0.5;>25% decrease). The maximum percent overlap between adjacent circles (% overlap) is presented. The 36% and 28% overlaps in decreases and increases between the two cohorts were 7- and 5-fold more likely than would be expected by chance, respectively, from the 12,388 and 12,725 genes whose basal expression were detected in either cohort.

[0021] FIGS. 4A-F show the two-way ANOVA of the 263 genes that showed co-directional changes in both schizophrenia cohorts. Distribution of the number of genes (“count”) whose variance changed as a function of each demographic factor, plotted for several significance value ranges (“p value”). FIG. 4A is a plot of the significance value range versus the distribution for Disease. FIG. 4B is a plot of the of the significance value range versus the distribution for Brain pH. FIG. 4C is a plot of the significance value range versus the distribution for Brain Weight. FIG. 4D is a plot of the significance value range versus the distribution for PMI. FIG. 4E is a plot of the significance value range versus the distribution for Brain pH. FIG. 4F is a plot of the significance value range versus the distribution for Sex. Note the expanded scale for p values between 0 and 0.2 for Disease (FIG. 4A) and Brain pH (4 C).

[0022] FIGS. 5A-D show expression of four genes representative in the individual controls and schizophrenic cases as follows: FIG. 5A shows expression of the proteasome; FIG. 5B shows expression of ubiquitin, FIG. 5C shows the expression of lactate dehydrogenase A and FIG. 5D shows the expression of NADH dehydrogenase. Mean expression level for each group is indicated by the black bar. Arrows identify the 3 patients who were not on antipsychotics at the time of death. These genes were also not altered in dentate neurons of rats (n=10/group) treated with the pharmacologically complex antipsychotic drug, clozapine, used by half of the schizophrenic patients. Expression levels for the half of the schizophrenia cases who had been treated with clozapine were evenly distributed within the entire group.

[0023] FIG. 6 is a schematic summarizing the biochemical pathways for which the most affected mRNA species were found in schizophrenia, and their relation to excitatory neurotransmitter inputs, pH control, and synaptic functions.

### BRIEF DESCRIPTION OF THE TABLES

[0024] Table 1. Lists genes relevant to mitochondria that were identified as being significantly altered in schizophrenia relative to normal controls (n=10-13/group). The average change (“ratio”) and statistical relevance (“P value”) is presented for the hippocampal dentate gyrus neurons (“Dentate”) and cells collected in the CA3 region of the hippocampus (“CA3”).

[0025] Table 2. Lists genes relevant to non-mitochondrial energy metabolism that were identified as significantly altered in schizophrenia relative to normal controls (n=10-13/group). The average change (“ratio”) and statistical relevance (“P value”) is presented for the hippocampal dentate gyrus neurons (“Dentate”) and cells collected in the CA3 region of the hippocampus (“CA3”).

[0026] Table 3. Lists genes relevant to the ubiquitin-proteasome system that were identified as significantly altered in schizophrenia relative to normal controls (n=10-13/group). The average change (“ratio”) and statistical relevance (“P value”) is presented for the hippocampal dentate gyrus neurons (“Dentate”) and cells collected in the CA3 region of the hippocampus (“CA3”).

[0027] Table 4. Lists lysosomal genes that were identified as significantly altered in schizophrenia relative to normal controls (n=10-13/group). The average change (“ratio”) and statistical relevance (“P value”) is presented for the hippocampal dentate gyrus neurons (“Dentate”) and cells collected in the CA3 region of the hippocampus (“CA3”).

[0028] Table 5. Lists genes relevant to immune/inflammatory mediators that were identified as significantly altered in schizophrenia relative to normal controls (n=10-13/group). The average change (“ratio”) and statistical relevance (“P value”) is presented for the hippocampal dentate gyrus neurons (“Dentate”) and cells collected in the CA3 region of the hippocampus (“CA3”).

[0029] Table 6. Lists genes relevant to synaptic plasticity, growth and development that were identified as significantly altered in schizophrenia relative to normal controls (n=10-13/group). The average change (“ratio”) and statistical relevance (“P value”) is presented for the hippocampal dentate gyrus neurons (“Dentate”) and cells collected in the CA3 region of the hippocampus (“CA3”).

[0030] Table 7. List binomial probabilities for some gene groups in which disproportionately high levels of individual genes are down regulated by schizophrenia in dentate.

[0031] Table 8. Lists the diagnostic category (Description), case ID number, case age, sex, PMI, brain pH, brain weight, body weight, and cumulative antipsychotic exposure of the 65 cases in Cohorts 1 and 2.

[0032] Table 9. Lists groupings of altered genes into functional pathways based upon binomial probability computation or Fisher exact test calculated by the EASE software. The functional categories in parentheses are for the EASE calculations. Bonferroni corrections (Bonf.) are a division of the p value score by the 11,000 distinct terms in gene ontology for the Binomial method and 9,000 terms used in EASE. A value of 1 indicated non-significant p value. Unmarked boxes represent terms not used by EASE or our binomial analysis.

[0033] Table 10. Lists genes relevant to the mitochondria and energy metabolism system that were identified as significantly altered in schizophrenia relative to normal controls (n=10-13/group). The average change (“ratio”) and statistical relevance (“P value”) is presented for the hippocampal dentate gyrus neurons in Cohorts 1 and 2.

[0034] Table 11. Lists genes relevant to the ubiquitin-proteasome system that were identified as significantly altered in schizophrenia relative to normal controls (n=10-13/group). The average change (“ratio”) and statistical relevance (“P value”) is presented for the hippocampal dentate gyrus neurons in Cohorts 1 and 2.

[0035] Table 12. Lists genes relevant to neuronal plasticity, growth and development that were identified as significantly altered in schizophrenia relative to normal controls (n=10-13/group). The average change (“ratio”) and statistical relevance (“P value”) is presented for the hippocampal dentate gyrus neurons in Cohorts 1 and 2.

[0036] Table 13. Validation of representative changes in mitochondrial, proteasome, ubitquitin, and neuronal plasticity genes using TawMan Q-PCR. Microarray Cohort 1: n=9/group, Cohort 2:n=14-15/group Q-PCR Cohorts 1 and 2: n=22 control, 20 schizophrenic cases.

[0037] Table 14. List of genes that were identified as significantly altered in schizophrenia relative to normal controls (n=10-13/group). The average change (“ratio”) and statistical relevance (“P value”) is presented for the hippocampal dentate gyrus neurons in Cohorts 1 and 2.

### DETAILED DESCRIPTION OF THE INVENTION

[0038] The present invention is now described, in detail, by way of the following particular examples. However, the use of such examples is illustrative only and in no way limits the scope or meaning of this invention or any exemplified term. Nor is the invention limited to any preferred embodiments(s) described herein. Indeed, many modifications and variations of the invention will be apparent to those skilled in the art upon reading this specification, and such “equivalents” can be made without departing from the invention in spirit or scope.

### EXAMPLE 1

### Identification of Mitochondrial; Non-Mitochondrial Energy; Ubiquitin Proteasome; Lysosomal; Immune/Inflammatory Mediator; and Synaptic Plasticity, Growth and Development Genes Differentially Expressed in Schizophrenia

[0039] LCM and cDNA microarrays were used to profile gene expression within hippocampal dentate granule or CA3 neurons in normal controls and in patients with schizophrenia, bipolar disorder, or depression. Reported is the specific down-regulation of large numbers of genes in the hippocampus of schizophrenic patients that encode for a few distinct macromolecular complexes. These complexes are involved in mitochondrial function, energy metabolism, proteasome function, lysosomal function, and synaptic transmission.

### Materials and Methods

[0040] Human tissue: All post-mortem brain tissues used in the present study were obtained from the Stanley Foundation Neuropathology Consortium. The patients were diagnosed according to DSM-IV criteria and comprised those with schizophrenia, bipolar disease, depression, and also included control patients who were free of diagnosed psychiatric disease (n=10-13 patients per group).
[0041] Preparation of sections: Ten μm-thick frozen coronal sections that contained the hippocampus were thaw-mounted onto 2×3 inch gelatin-coated microscope slides and stored at −80 deg C. until use.
[0042] Cell capture: Each section was quick-thawed, fixed in 75% ethanol, re-hydrated in dH2O and stained for 2 min. with Arcturus Histogene™ staining solution. The sections were dehydrated in ascending ethanols, placed into xylene for 5 minutes and air-dried for 15 minutes prior to laser-capture. Approximately 1000 dentate granule cells or CA3 cells were micro-dissected from each of 2-3 sections using an Arcturus PixCell II-eTM laser-capture microscope. All tissue collection and subsequent procedures were conducted in a blind and counterbalanced manner between the four patient groups.
[0043] RNA Amplification: The total RNA extracted from the dentate granule or CA3 cells of each patient sample underwent two rounds of linear amplification using the Arcturus RiboAmp kit, yielding an average of 167 ug of amplified RNA (aRNA) for each sample. Equal amounts of each control sample were pooled to generate a common reference sample, against which the individual samples were hybridized on microarrays.
[0044] RNA Labeling for Agilent Microarrays. 400 ng of aRNA (individual or common reference sample) was mixed with 400 ng of random hexamers (Promega) in a volume of 50 ul, denatured for 10 min at 700° C., chilled on ice, and collected by brief centrifugation. 50 ul of a 2× master mix (containing First Strand Reaction Buffer, DTT, dNTPs and MMLV-RT from the Agilent Direct-Label cDNA Synthesis Kit and 2.5 ul of 1.0 uM Cyanine 3-dCTP or Cyanine 5-dCTP from Perkin-Elmer NEN) was added on ice. Reactions were incubated for 10 min at 25° C., 1 h at 42° C., and 10 min at 70° C., chilled on ice, and collected by brief centrifugation. Following treatment with 2 ul of 0.05 mg/ml RNase IA (Agilent Technologies) for 30 min at room temperature, the labeled cDNA was purified using the QIAquick PCR Purification Kit (Qiagen) following the manufacturer's directions, with an additional wash step of 0.75 ml 35% guanidine hydrochloride prior to washing with Qiagen buffer PE. The purified Cy3 and Cy5-labeled cDNAs were combined, concentrated to dryness in a Speedvac centrifuge concentrator (Savant), and resuspended in 7.5 ul H2O.
[0045] Hybridization, Washing, and Scanning of Agilent Human 1 cDNA Microarrays. 2.5 ul Deposition Control Target (Operon), 2.5 ul human 1 mg/ml COT-1 DNA (Invitrogen), and 12.5 ul 2× Hybridization Buffer (Agilent) was added to the labeled cDNA. The mixture was heated at 98° C. for 2 min, centrifuged for 5 min at room temperature and applied to coverslipped Agilent Human 1 cDNA Microarrays. Arrays were hybridized for 17 hr at 65° C. in humidified chambers (Corning). Coverslips were removed by submerging briefly in 0.5×SSC, 0.01% SDS, then arrays were agitated for 5 min at room temperature in the same buffer, followed by 2 min in room temperature 0.06×SSC. Slides were dried by centrifugation at 500×g and scanned using the Agilent G2565AA Microarray Scanner System.
[0046] Microarray Data Analysis: Only those genes that produced an average intensity of at least 300 in at least one of the sample groups were evaluated. The log ratio for each sample/reference value was determined for each gene and the mean log ratio calculated for each patient group. Log ratios are utilized in the processing of two-channel array data because it is expected that the distribution of log ratios is closer to normality than the distribution of ratios. For each gene, the mean ratio for the patient group was then divided by the mean ratio of the control group to calculate the fold change between the two groups. Welch t test p values were determined by comparing schizophrenia/reference log ratios to control/reference log ratios for each gene. Genes were selected as those with a p value<0.05 and a fold change compared to controls of greater than 25%.

### Results

[0047] Tables 1-6 below provide lists of genes identified as being significantly altered in schizophrenia relative to normal controls (n=10-13/group). These genes were in each table according to their relevance to mitochondria (Table 1), non-mitochondrial energy metabolism (Table 2), the ubiquitin-proteasome system (Table 3), lysosome (Table 4), immune/inflammatory mediators (Table 5), and synaptic plasticity, growth and development (Table 6). In each table, the average change (“ratio”) and statistical relevance (“P value”) is presented for the hippocampal dentate gyrus (“Dentate”) and cells collected in the CA3 region of the hippocampus (“CA3”).

[0048] Microarray experiments, such as the ones described here, simultaneously measure changes in the expression of many different genes. Therefore, there is some concern that many of the observed changes may result from chance fluctuations and are not representative of a real disease effect on gene expression. The likelihood of chance fluctuations is significantly less is multiple changes are observed among genes of a common pathway, macromolecular complex or other biological functional group. This is because, where such a “cluster” of genes is truly affected by a disease, the proportion of gene changes within that cluster will be significantly greater than the proportion of gene changes among all genes expressed by the cell(s).

[0049] In the experiments described here, binomial probabilities are used to assess whether the proportion of genes in a functional group that are declared “hits” (based on the cut-off criteria for p-values and ratios) is significantly greater than the average proportion of hits among all genes. For example, in the dentate experiments described here, 9342 genes were expressed at levels that pass the abundance cut-off requirement of 300. Of these expressed genes, a total of 576 genes were downregulated in schizophrenia with p-values below 0.05 and ratios less than 0.8. Hence, the probability that any randomly selected gene is downregulated is schizophrenia is 576/9342 or 6.17%. Of the expressed genes, 55 are in the proteasome pathway and 14 (i.e., approximately 25%) of those genes are down-regulated with p-values and ratios that fall below the above-mentioned cut-off values. Yet the probability that 14 randomly selected genes (out of the total 9342 genes expressed) are all down regulated is only (0.0617)¹⁴=4.5×10⁻⁶. Similar binomial probabilities are set forth in Table 7, infa, for other pathway groups. Such a low probabilities give great confidence that the fluctuations observed among the different pathway genes are real effects of the schizophrenia disease and not merely a random fluctuation in gene expression.

TABLE 1

| | | | | CA3 | |
|---|---|---|---|---|---|
| | | Dentate | | | P |
| Gene Description | Genbank | Ratio | P Value | Ratio | Value |
| 2,4-dienoyl CoA reductase 1, mitochondrial | L26050 | | | 0.726 | 0.0377 |
| 3-hydroxybutyrate dehydrogenase (heart, | AW246790 | | | 0.687 | 0.0067 |
| mitochondrial) | | | | | |
| acetyl-Coenzyme A acetyltransferase 1 | D90228 | 0.799 | 0.00793 | | |
| (acetoacetyl Coenzyme A thiolase) | | | | | |
| acetyl-Coenzyme A acyltransferase 2 | D16294 | 0.733 | 0.01538 | | |
| (mitochondrial 3-oxoacyl-Coenzyme A thiolase) | | | | | |
| acyl-Coenzyme A dehydrogenase, C-4 to C-12 | AA505399 | | | 0.751 | 0.0459 |
| straight chain | | | | | |
| AFG3 ATPase family gene 3-like 2 (yeast) | Y18314 | 0.673 | 0.00791 | | |
| alternative; H. sapiens gene for phosphate | X77337 | 0.756 | 0.00106 | | |
| carrier. | | | | | |
| arginase, type II | D86724 | 0.777 | 0.02395 | | |
| ATP synthase, H+ transporting, mitochondrial | X60221 | 0.649 | 0.00126 | | |
| F0 complex, subunit b, isoform 1 | | | | | |
| ATP synthase, H+ transporting, mitochondrial | BE383477 | 0.646 | 0.00084 | 0.621 | 0.0328 |
| F0 complex, subunit c (subunit 9) isoform 3 | | | | | |
| ATP synthase, H+ transporting, mitochondrial | D13119 | 0.795 | 0.01715 | | |
| F0 complex, subunit c (subunit 9), isoform 2 | | | | | |
| ATP synthase, H+ transporting, mitochondrial | NM_007100 | 0.787 | 0.00134 | | |
| F0 complex, subunit e | | | | | |
| ATP synthase, H+ transporting, mitochondrial | AI138629 | 0.755 | 0.00252 | | |
| F0 complex, subunit g | | | | | |
| ATP synthase, H+ transporting, mitochondrial | D14710 | 0.682 | 0.00078 | 0.680 | 0.0375 |
| F1 complex, alpha subunit, isoform 1, cardiac | | | | | |
| muscle | | | | | |
| ATP synthase, H+ transporting, mitochondrial | AF052955 | 0.781 | 0.00427 | | |
| F1 complex, epsilon subunit | | | | | |
| ATP synthase, H+ transporting, mitochondrial | D16563 | 0.697 | 0.00483 | 0.590 | 0.0491 |
| F1 complex, gamma polypeptide 1 | | | | | |
| ATP synthase, H+ transporting, mitochondrial | AI215675 | 0.679 | 0.00008 | 0.665 | 0.0455 |
| F1 complex, O subunit (oligomycin sensitivity | | | | | |
| conferring protein) | | | | | |
| ATP/ADP translocator; Human heart/skeletal | J04982 | 0.652 | 0.00035 | | |
| muscle ATP/ADP translocator (ANT1) gene, | | | | | |
| complete cds. | | | | | |
| cytochrome b-245, beta polypeptide (chronic | X04011 | 0.747 | 0.00029 | 0.775 | 0.0365 |
| granulomatous disease) | | | | | |
| cytochrome b5 outer mitochondrial membrane | AB009282 | 0.757 | 0.00878 | 0.671 | 0.0142 |
| precursor | | | | | |
| cytochrome c oxidase subunit IV isoform 1 | NM_001861 | 0.786 | 0.00198 | | |
| cytochrome c oxidase subunit VIc | X13238 | 0.738 | 0.00244 | | |
| cytochrome c oxidase subunit VIIa polypeptide | AA525082 | 0.660 | 0.00026 | | |
| 2 (liver) | | | | | |
| cytochrome c oxidase subunit VIIa polypeptide | AI355189 | 0.776 | 0.00910 | | |
| 2 like | | | | | |
| cytochrome c oxidase subunit VIIb | AI209213 | 0.654 | 0.00085 | 0.771 | 0.0399 |
| cytochrome c; Human somatic cytochrome c | M22877 | 0.632 | 0.00205 | 0.576 | 0.0311 |
| (HCS) gene, complete cds. | | | | | |
| cytochrome P450 4F4 | AAC52358 | 0.772 | 0.03089 | | |
| cytochrome P450IIE1; Human cytochrome | J02843 | | | 0.769 | 0.0377 |
| P450IIE1 (ethanol-inducible) gene, complete | | | | | |
| cds. | | | | | |
| diaphorase (NADH) (cytochrome b-5 | M16462 | 0.795 | 0.01151 | | |
| reductase) | | | | | |
| diazepam binding inhibitor (GABA receptor | AA868701 | 0.738 | 0.00040 | | |
| modulator, acyl-Coenzyme A binding protein) | | | | | |
| dihydrolipoamide dehydrogenase (E3 | J03620 | 0.779 | 0.00246 | 0.728 | 0.0162 |
| component of pyruvate dehydrogenase | | | | | |
| complex, 2-oxo-glutarate complex, branched | | | | | |
| chain keto acid dehydrogenase complex) | | | | | |
| electron-transfer-flavoprotein, alpha | W19485 | 0.698 | 0.00087 | | |
| polypeptide (glutaric aciduria II) | | | | | |
| electron-transfer-flavoprotein, beta polypeptide | X71129 | 0.787 | 0.03428 | | |
| enoyl Coenzyme A hydratase 1, peroxisomal | AI718453 | | | 0.780 | 0.0316 |
| EST, Highly similar to CY1_HUMAN | AK026633 | 0.712 | 0.00815 | 0.649 | 0.0194 |
| Cytochrome c1, heme protein, mitochondrial | | | | | |
| precursor [H. sapiens] | | | | | |
| EST, Moderately similar to NUML_HUMAN | AL110150 | 0.669 | 0.01789 | 0.593 | 0.0284 |
| NADH-ubiquinone oxidoreductase MLRQ | | | | | |
| subunit (Complex I-MLRQ) (CI-MLRQ) | | | | | |
| [H. sapiens] | | | | | |
| EST, Weakly similar to TTC1_HUMAN | AK000594 | 0.781 | 0.03182 | | |
| Tetratricopeptide repeat protein 1 (TPR repeat | | | | | |
| protein 1) [H. sapiens] | | | | | |
| fatty-acid-Coenzyme A ligase, very long-chain 1 | NM_003645 | 0.763 | 0.00873 | | |
| glutamic-oxaloacetic transaminase 2, | M22632 | 0.767 | 0.01843 | 0.735 | 0.0367 |
| mitochondrial (aspartate aminotransferase 2) | | | | | |
| glycine C-acetyltransferase (2-amino-3- | AF077740 | | | 0.773 | 0.0409 |
| ketobutyrate coenzyme A ligase) | | | | | |
| glycine cleavage system protein H | D00723 | 0.674 | 0.01163 | | |
| (aminomethyl carrier) | | | | | |
| H. sapiens gene encoding enoyl-CoA | X98126 | 0.787 | 0.00036 | | |
| hydratase, exon 1(and joined CDS). | | | | | |
| H. sapiens gene for mitochondrial ATP | X69907 | 0.753 | 0.00152 | 0.668 | 0.0154 |
| synthase c subunit (P1 form). | | | | | |
| H. sapiens gene for mitochondrial ATP | X69908 | 0.798 | 0.00030 | | |
| synthase c subunit (P2 form). | | | | | |
| Homo sapiens (clone f17252) ubiquinol | L32977 | 0.587 | 0.00007 | | |
| cytochrome c reductase Rieske iron-sulphur | | | | | |
| protein (UQCRFS1) gene, exon 2. | | | | | |
| Homo sapiens ATP synthase beta subunit | M27132 | 0.775 | 0.00423 | | |
| precursor (ATPSB) gene, complete cds. | | | | | |
| Homo sapiens cDNA: FLJ22657 fis, clone | AK026310 | 0.718 | 0.00034 | | |
| HS107791, highly similar to HUMCYB5 Human | | | | | |
| cytochrome b5 mRNA. | | | | | |
| Homo sapiens cDNA: FLJ22970 fis, clone | AK026623 | | | 0.696 | 0.0496 |
| KAT10766, highly similar to HUMCOXNE | | | | | |
| Homo sapiens nuclear-encoded mitochondrial | | | | | |
| cytochrome c oxidase Va subunit mRNA. | | | | | |
| Human cytochrome c oxidase subunit VIa | U83702 | 0.722 | 0.00060 | | |
| gene, exon 3 and complete cds. | | | | | |
| Human cytochrome c oxidase subunit VIII | J04823 | 0.746 | 0.00150 | 0.704 | 0.0105 |
| (COX8) mRNA, complete cds. | | | | | |
| Human DNA sequence from BAC 15E1 on | AL021546 | 0.742 | 0.00142 | | |
| chromosome 12. Contains Cytochrome C | | | | | |
| Oxidase Polypeptide VIa-liver precursor gene, | | | | | |
| 60S ribosomal protein L31 pseudogene, pre- | | | | | |
| mRNA splicing factor SRp30c gene, two | | | | | |
| putative genes, ESTs, STSs and putative CpG | | | | | |
| islands | | | | | |
| Human gene for ATP synthase alpha subunit, | D28126 | 0.717 | 0.00768 | 0.661 | 0.0361 |
| complete cds (exon 1 to 12). | | | | | |
| inner membrane protein, mitochondrial | L42572 | 0.780 | 0.00339 | 0.637 | 0.0485 |
| (mitofilin) | | | | | |
| isocitrate dehydrogenase 2 (NADP+), | X69433 | 0.782 | 0.00005 | | |
| mitochondrial | | | | | |
| isocitrate dehydrogenase 3 (NAD+) alpha | U07681 | 0.705 | 0.00451 | | |
| isocitrate dehydrogenase 3 (NAD+) beta | BE409783 | 0.740 | 0.00356 | 0.685 | 0.0456 |
| L-3-hydroxyacyl-Coenzyme A dehydrogenase, | X96752 | 0.762 | 0.03391 | 0.659 | 0.0337 |
| short chain | | | | | |
| liver isoform; Homo sapiens cytochrome-c | AF134406 | 0.656 | 0.00051 | | |
| oxidase subunit VIIaL precursor (COX7AL) | | | | | |
| gene, complete cds. | | | | | |
| low molecular mass ubiquinone-binding protein | AL036415 | 0.654 | 0.00011 | | |
| (9.5 kD) | | | | | |
| malate dehydrogenase 1, NAD (soluble) | D55654 | 0.695 | 0.01172 | | |
| malate dehydrogenase 2, NAD (mitochondrial) | AW249275 | 0.609 | 0.00002 | 0.621 | 0.0049 |
| malic enzyme 3, NADP(+)-dependent, | X79440 | | | 0.665 | 0.0433 |
| mitochondrial | | | | | |
| metaxin 2 | AF053551 | 0.681 | 0.00044 | 0.664 | 0.0488 |
| mitochondrial carrier homolog 1 | AF176006 | 0.723 | 0.00039 | 0.685 | 0.0157 |
| mitochondrial ribosomal protein L3 | NM_007208 | 0.708 | 0.00202 | | |
| mitochondrial ribosomal protein L32 | AF161401 | | | 0.743 | 0.0159 |
| mitochondrial ribosomal protein L33 | NM_004891 | 0.691 | 0.00001 | | |
| mitochondrial ribosomal protein S18A | AK001410 | 0.786 | 0.03928 | | |
| mitochondrial ribosomal protein S30 | AL355715 | | | 0.673 | 0.0186 |
| NADH dehydrogenase (ubiquinone) 1 alpha | AF087661 | 0.789 | 0.00275 | 0.715 | 0.0099 |
| subcomplex, 10, 42 kDa | | | | | |
| NADH dehydrogenase (ubiquinone) 1 alpha | NM_002490 | | | 0.690 | 0.0364 |
| subcomplex, 6, 14 kDa | | | | | |
| NADH dehydrogenase (ubiquinone) 1 beta | AF047181 | 0.592 | 0.00013 | 0.681 | 0.0265 |
| subcomplex, 5 (16 kD, SGDH) | | | | | |
| NADH dehydrogenase (ubiquinone) 1 beta | AF035840 | 0.706 | 0.00532 | | |
| subcomplex, 6 (17 kD, B17) | | | | | |
| NADH dehydrogenase (ubiquinone) 1 beta | AF112200 | | | 0.787 | 0.0368 |
| subcomplex, 7, 18 kDa | | | | | |
| NADH dehydrogenase (ubiquinone) 1, | BE266480 | | | 0.675 | 0.0247 |
| alpha/beta subcomplex, 1, 8 kDa | | | | | |
| NADH dehydrogenase (ubiquinone) 1, | AF047184 | 0.794 | 0.00186 | 0.730 | 0.0460 |
| subcomplex unknown, 1 (6 kD, KFYI) | | | | | |
| NADH dehydrogenase (ubiquinone) Fe—S | AF050640 | 0.798 | 0.00938 | | |
| protein 2, 49 kDa (NADH-coenzyme Q | | | | | |
| reductase) | | | | | |
| NADH dehydrogenase (ubiquinone) Fe—S | AF020351 | 0.588 | 0.00010 | 0.635 | 0.0202 |
| protein 4 (18 kD) (NADH-coenzyme Q | | | | | |
| reductase | | | | | |
| NADH dehydrogenase (ubiquinone) Fe—S | AF038406 | 0.755 | 0.01283 | 0.785 | 0.0455 |
| protein 8 (23 kD) (NADH-coenzyme Q | | | | | |
| reductase) | | | | | |
| NADH dehydrogenase (ubiquinone) | AW250734 | | | 0.696 | 0.0090 |
| flavoprotein 1, 51 kDa | | | | | |
| ornithine aminotransferase (gyrate atrophy) | M12267 | 0.752 | 0.01470 | | |
| phosphogluconate dehydrogenase | U30255 | 0.754 | 0.00104 | 0.778 | 0.0429 |
| precursor; Human mitochondrial creatine | J04469 | | | 0.696 | 0.0171 |
| kinase (CKMT) gene, complete cds. | | | | | |
| programmed cell death 8 (apoptosis-inducing | AF100928 | 0.794 | 0.01132 | | |
| factor) | | | | | |
| propionyl Coenzyme A carboxylase, alpha | S79219 | 0.752 | 0.00090 | | |
| polypeptide | | | | | |
| pyruvate dehydrogenase (lipoamide) beta | NM_000925 | 0.751 | 0.03512 | | |
| Pyruvate dehydrogenase complex, lipoyl- | U82328 | 0.692 | 0.00460 | 0.555 | 0.0287 |
| containing component X; E3-binding protein | | | | | |
| SCO cytochrome oxidase deficient homolog 1 | AI332708 | 0.612 | 0.00034 | 0.624 | 0.0437 |
| (yeast) | | | | | |
| serine hydroxymethyltransferase 2 | NM_005412 | | | 0.706 | 0.0187 |
| (mitochondrial) | | | | | |
| similar to CI-AGGG; Homo sapiens NADH- | AF067166 | 0.704 | 0.00013 | | |
| ubiquinone oxidoreductase AGGG subunit | | | | | |
| precursor homolog mRNA, nuclear gene | | | | | |
| encoding mitochondrial protein, complete cds. | | | | | |
| solute carrier family 25 (mitochondrial carrier; | J02683 | 0.621 | 0.00029 | 0.694 | 0.0220 |
| adenine nucleotide translocator), member 5 | | | | | |
| succinate dehydrogenase complex, subunit A, | L21936 | 0.739 | 0.00478 | 0.662 | 0.0396 |
| flavoprotein (Fp) | | | | | |
| succinate dehydrogenase complex, subunit B, | AW960231 | 0.660 | 0.00002 | 0.704 | 0.0230 |
| iron sulfur (Ip) | | | | | |
| succinate dehydrogenase complex, subunit C, | D49737 | 0.775 | 0.00662 | | |
| integral membrane protein, 15 kD | | | | | |
| succinate dehydrogenase complex, subunit D, | NM_003002 | 0.660 | 0.00171 | | |
| integral membrane protein | | | | | |
| surfeit 1 | Z35093 | 0.759 | 0.00060 | | |
| thioredoxin reductase 1 | D88687 | 0.754 | 0.00343 | | |
| translocase of inner mitochondrial membrane | AW247564 | 0.625 | 0.00021 | 0.641 | 0.0325 |
| 17 homolog A (yeast) | | | | | |
| ubiquinol-cytochrome c reductase (6.4 kD) | AW163002 | 0.673 | 0.00011 | 0.745 | 0.0157 |
| subunit | | | | | |
| ubiquinol-cytochrome c reductase core protein I | AI373152 | 0.747 | 0.01916 | 0.718 | 0.0241 |
| ubiquinol-cytochrome c reductase core protein | NM_003366 | 0.784 | 0.00901 | 0.661 | 0.0261 |
| II | | | | | |
| ubiquinol-cytochrome c reductase hinge | AI093521 | 0.642 | 0.00069 | 0.621 | 0.0324 |
| protein | | | | | |
| voltage-dependent anion channel 1 | L06132 | 0.710 | 0.00278 | | |

[0050] TABLE 2

| | | Dentate | | CA3 | |
|---|---|---|---|---|---|
| Gene Description | Genbank | Ratio | P Value | Ratio | P Value |
| aldehyde dehydrogenase 9 family, | U34252 | 0.7402 | 0.00523 | | |
| member A1 | | | | | |
| ferrochelatase (protoporphyria) | D00726 | 0.7211 | 0.04746 | 0.706 | 0.0224 |
| H. sapiens gene for | X83464 | 0.7795 | 0.00007 | | |
| glucosephosphate isomerase (exon | | | | | |
| 15, 16, 17 and 18). | | | | | |
| H. sapiens lactate dehydrogenase B | X13800 | 0.7890 | 0.00152 | | |
| gene exon 8 (EC 1.1.1.27). | | | | | |
| Homo sapiens aldose reductase | AF032455 | 0.6683 | 0.00009 | 0.701 | 0.0105 |
| gene, complete cds. | | | | | |
| Homo sapiens COX17 (COX17) | AF269245 | | | 0.664 | 0.0289 |
| gene, exon 3. | | | | | |
| Homo sapiens gene for insulin | AB000732 | 0.7874 | 0.00831 | | |
| receptor substrate-2, complete cds. | | | | | |
| Homo sapiens insulin induced | U96876 | 0.6265 | 0.00159 | | |
| protein 1 (INSIG1) gene, complete | | | | | |
| cds. | | | | | |
| Human aldose reductase (AR) | M59783 | 0.6571 | 0.00019 | 0.733 | 0.0150 |
| gene, segment 2. | | | | | |
| Human glucose transporter 2 | L09674 | | | 0.709 | 0.0180 |
| (GLUT2) gene, exon 1. | | | | | |
| lactate dehydrogenase A | X02152 | 0.5732 | 0.00017 | 0.558 | 0.0211 |
| lactate dehydrogenase B | Y00711 | 0.6206 | 0.00009 | | |
| phosphofructokinase, muscle | M26066 | 0.6892 | 0.03342 | | |
| phosphorylase kinase, beta | X84908 | 0.7328 | 0.01187 | | |
| protein phosphatase 1, regulatory | NM_006241 | 0.7884 | 0.00771 | 0.590 | 0.0482 |
| (inhibitor) subunit 2 | | | | | |
| sialyltransferase 8A (alpha-N- | NM_003034 | 0.7236 | 0.02322 | | |
| acetylneuraminate: alpha-2,8- | | | | | |
| sialytransferase, GD3 synthase) | | | | | |

[0051] TABLE 3

| | | Dentate | | CA3 | |
|---|---|---|---|---|---|
| Gene Description | Genbank | Ratio | P Value | Ratio | P Value |
| 26S proteasome-associated pad1 homolog | U86782 | 0.717 | 0.00645 | 0.665 | 0.0484 |
| F-box and leucine-rich repeat protein 2 | AF176518 | 0.784 | 0.00313 | | |
| Homo sapiens cONA FLJ13228 fis, clone | AK023290 | | | 0.650 | 0.0414 |
| OVARC1000085, highly similar to Human | | | | | |
| mRNA for proteasome subunit HC5. | | | | | |
| Homo sapiens UbcM2 mRNA, complete cds. | AF085362 | 0.756 | 0.00076 | | |
| Homo sapiens ubiquitin carboxy-terminal | AF076269 | 0.640 | 0.00041 | | |
| hydrolase L1 (UCHL1) gene, exon 3. | | | | | |
| Homo sapiens ubiquitin gene. | X04803 | 0.578 | 0.00002 | 0.631 | 0.0195 |
| Human mannosidase, beta A, lysosomal | AF224669 | 0.774 | 0.00026 | 0.791 | 0.0278 |
| (MANBA) gene, and ubiquitin-conjugating | | | | | |
| enzyme E2D 3 (UBE2D3) genes, complete | | | | | |
| cds. | | | | | |
| proteasome (prosome, macropain) 26S | L02426 | 0.778 | 0.00163 | | |
| subunit, ATPase, 1 | | | | | |
| proteasome (prosome, macropain) 26S | BE397250 | | | 0.653 | 0.0284 |
| subunit, ATPase, 4 | | | | | |
| proteasome (prosome, macropain) 26S | AF006305 | 0.725 | 0.00134 | | |
| subunit, ATPase, 6 | | | | | |
| proteasome (prosome, macropain) 26S | D44466 | | | 0.737 | 0.0428 |
| subunit, non-ATPase, 1 | | | | | |
| proteasome (prosome, macropain) 26S | AB009619 | | | 0.686 | 0.0200 |
| subunit, non-ATPase, 10 | | | | | |
| proteasome (prosome, macropain) 26S | D38047 | 0.633 | 0.00007 | 0.618 | 0.0152 |
| subunit, non-ATPase, 8 | | | | | |
| proteasome (prosome, macropain) 26S | AB003177 | 0.745 | 0.00031 | | |
| subunit, non-ATPase, 9 | | | | | |
| proteasome (prosome, macropain) activator | AA310524 | 0.728 | 0.01419 | 0.716 | 0.0167 |
| subunit 1 (PA28 alpha) | | | | | |
| proteasome (prosome, macropain) inhibitor | D88378 | 0.750 | 0.00456 | | |
| subunit 1 (PI31) | | | | | |
| proteasome (prosome, macropain) subunit, | AI889267 | 0.679 | 0.00049 | | |
| alpha type, 1 | | | | | |
| proteasome (prosome, macropain) subunit, | D00760 | 0.735 | 0.02299 | 0.619 | 0.0429 |
| alpha type, 2 | | | | | |
| proteasome (prosome, macropain) subunit, | AF054185 | 0.799 | 0.03398 | | |
| alpha type, 7 | | | | | |
| proteasome (prosome, macropain) subunit, | AL031259 | 0.713 | 0.00080 | 0.677 | 0.0357 |
| beta type, 1 | | | | | |
| proteasome (prosome, macropain) subunit, | D26598 | 0.705 | 0.01348 | 0.647 | 0.0275 |
| beta type, 3 | | | | | |
| proteasome (prosome, macropain) subunit, | D29012 | 0.660 | 0.00007 | 0.662 | 0.0079 |
| beta type, 6 | | | | | |
| ubiquitin A-52 residue ribosomal protein | AF075321 | 0.798 | 0.04430 | | |
| fusion product 1 | | | | | |
| ubiquitin B | BE250544 | 0.638 | 0.00001 | 0.680 | 0.0150 |
| ubiquitin C | AA600188 | 0.734 | 0.00290 | 0.755 | 0.0252 |
| ubiquitin carrier protein | AI571293 | 0.794 | 0.00146 | 0.750 | 0.0158 |
| ubiquitin specific protease 14 (tRNA-guanine | NM_005151 | 0.794 | 0.01580 | 0.562 | 0.0311 |
| transglycosylase) | | | | | |
| ubiquitin specific protease 9, X chromosome | NM_004652 | 0.779 | 0.00582 | | |
| (fat facets-like Drosophila) | | | | | |
| ubiquitin-activating enzyme E1C (UBA3 | AL117566 | 0.742 | 0.01442 | 0.665 | 0.0277 |
| homolog, yeast) | | | | | |
| ubiquitin-conjugating enzyme E2A (RAD6 | NM_003336 | 0.702 | 0.00105 | 0.718 | 0.0370 |
| homolog) | | | | | |
| ubiquitin-conjugating enzyme E2D 1 (UBC4/5 | AI816068 | 0.768 | 0.00096 | 0.629 | 0.0464 |
| homolog, yeast) | | | | | |
| ubiquitin-conjugating enzyme E2G 1 (UBC7 | D78514 | 0.799 | 0.02525 | | |
| homolog, C. elegans) | | | | | |
| ubiquitin-conjugating enzyme E2N (UBC13 | D83004 | 0.715 | 0.00318 | | |
| homolog, yeast) | | | | | |
| ubiquitin-like 1 (sentrin) | U61397 | 0.740 | 0.00300 | | |

[0052] TABLE 4

| | | Dentate | | CA3 | |
|---|---|---|---|---|---|
| Gene Description | Genbank | Ratio | P Value | Ratio | P Value |
| ATPase, H+ transporting, lysosomal 13 kD, V1 | AW962223 | 0.609 | 0.00053 | 0.475 | 0.04296 |
| subunit G isoform 2 | | | | | |
| ATPase, H+ transporting, lysosomal 21 kD, V0 | D89052 | 0.759 | 0.02063 | 0.734 | 0.02699 |
| subunit c | | | | | |
| ATPase, H+ transporting, lysosomal 31 kD, V1 | X76228 | 0.673 | 0.00003 | 0.634 | 0.04942 |
| subunit E isoform 1 | | | | | |
| ATPase, H+ transporting, lysosomal 34 kD, V1 | H82183 | 0.563 | 0.00031 | 0.531 | 0.04111 |
| subunit D | | | | | |
| ATPase, H+ transporting, lysosomal 38 kDa, | X71490 | | | 0.673 | 0.01133 |
| V0 subunit d isoform 1 | | | | | |
| ATPase, H+ transporting, lysosomal 42 kD, V1 | AI338777 | 0.747 | 0.01640 | | |
| subunit C, isoform 1 | | | | | |
| ATPase, H+ transporting, lysosomal 50/57 kD | AF132945 | 0.718 | 0.00270 | | |
| V1 subunit H | | | | | |
| ATPase, H+ transporting, lysosomal 56/58 kD, | L35249 | 0.748 | 0.00059 | | |
| V1 subunit B, isoform 2 | | | | | |
| ATPase, H+ transporting, lysosomal | NM_001183 | 0.797 | 0.00741 | 0.800 | 0.03972 |
| interacting protein 1 | | | | | |
| Human lysosomal membrane glycoprotein | M58485 | 0.765 | 0.00131 | | |
| CD63 mRNA. | | | | | |
| lipase A, lysosomal acid, cholesterol esterase | X76488 | 0.683 | 0.00227 | 0.719 | 0.03961 |
| (Wolman disease) | | | | | |
| Lysosomal-associated multispanning | U51240 | | | 0.758 | 0.02800 |
| membrane protein-5 | | | | | |
| lysosomal-associated protein transmembrane | D14696 | 0.704 | 0.00196 | | |
| 4 alpha | | | | | |
| sphingomyelin phosphodiesterase 1, acid | X59960 | 0.727 | 0.01428 | | |
| lysosomal (acid sphingomyelinase) | | | | | |

[0053] TABLE 5

| | | Dentate | | CA3 | |
|---|---|---|---|---|---|
| Gene Description | Genbank | Ratio | P Value | Ratio | P Value |
| alternative; Homo sapiens rac1 gene. | AJ132695 | 1.295 | 0.0030 | | |
| arachidonate 15-lipoxygenase | M23892 | 1.250 | 0.0085 | | |
| CC chemokine receptor-3; CCR3; Human | U51241 | | | 1.485 | 0.0330 |
| eosinophil eotaxin receptor (CMKBR3) gene, | | | | | |
| complete cds. | | | | | |
| chemokine (C—C motif) ligand 13 | U46767 | | | 1.324 | 0.0490 |
| chemokine (C—C motif) receptor 2 | U03882 | 1.265 | 0.0128 | | |
| chemokine binding protein 2 | U94888 | 1.272 | 0.0284 | | |
| complement component 1, r subcomponent | X04701 | 1.315 | 0.0062 | | |
| complement component 5 receptor 1 (C5a ligand) | M62505 | 1.285 | 0.0072 | | |
| H. sapiens cDNA for TREB protein. | X55543 | 1.300 | 0.0228 | | |
| Human CRFB4 gene, partial cds. | U08988 | | | 1.424 | 0.0429 |
| Human helix-loop-helix protein (HEB) gene, | U35052 | 1.462 | 0.0223 | | |
| promoter region and exon 1. | | | | | |
| interleukin 13 | NM_002188 | 1.250 | 0.0115 | | |
| interleukin 17 (cytotoxic T-lymphocyte-associated | U32659 | 1.271 | 0.0105 | | |
| serine esterase 8) | | | | | |
| interleukin 3 receptor, alpha (low affinity) | M74782 | 1.355 | 0.0059 | 1.439 | 0.0160 |
| interleukin 6 receptor | NM_000565 | 1.256 | 0.0377 | 1.540 | 0.0398 |
| interleukin 8 receptor, beta | AW028346 | 1.311 | 0.0097 | | |
| interleukin 9 receptor | M84747 | 1.267 | 0.0008 | | |
| leukocyte immunoglobulin-like receptor, subfamily | AF004231 | | | 1.299 | 0.0353 |
| B (with TM and ITIM domains), member 2 | | | | | |
| leukocyte-associated Ig-like receptor 1 | NM_002287 | | | 1.670 | 0.0052 |
| Lps; encodes most common amino acid sequence | AF177765 | 1.267 | 0.0099 | | |
| in humans; membrane spanning component of the | | | | | |
| human LPS receptor; human homolog of the | | | | | |
| mouse Lps gene product; Homo sapiens toll-like | | | | | |
| receptor 4 (TLR4) gene, TLR4A allele, complete | | | | | |
| cds. | | | | | |
| mannose-binding lectin (protein C) 2, soluble | X15422 | | | 1.499 | 0.0432 |
| (opsonic defect) | | | | | |
| nuclear factor NF-IL6 (AA 1-345); Human gene for | X52560 | 1.282 | 0.0011 | | |
| nuclear factor NF-IL6. | | | | | |
| prostaglandin-endoperoxide synthase 2 | L15326 | 1.283 | 0.0036 | | |
| (prostaglandin G/H synthase and cyclooxygenase) | | | | | |
| receptor-interacting serine-threonine kinase 2 | AF027706 | 1.250 | 0.0038 | | |
| transcription factor 7 (T-cell specific, HMG-box) | X59870 | | | 1.438 | 0.0178 |
| vitronectin (serum spreading factor, somatomedin | X03168 | 1.266 | 0.0220 | | |
| B, complement S-protein) | | | | | |

[0054] TABLE 6

| | | Dentate | | CA3 | |
|---|---|---|---|---|---|
| Gene Description | Genbank | Ratio | P Value | Ratio | P Value |
| adaptor-related protein complex 2, sigma 1 subunit | X97074 | 0.791 | 0.00088 | | |
| adaptor-related protein complex 2, sigma 1 subunit | AB030654 | 0.782 | 0.00864 | | |
| adenosine A1 receptor | L22214 | 0.770 | 0.03475 | | |
| ADP-ribosylation factor 4-like | L38490 | 0.610 | 0.00019 | 0.672 | 0.0212 |
| adrenergic, alpha-1D-, receptor | S70782 | | | 0.706 | 0.0198 |
| amino-terminal enhancer of split; GRG PROTEIN; ESP1 | AC005944 | | | 0.759 | 0.0402 |
| PROTEIN; AMINO ENHANCER OF SPLIT; AES-1/AES-2; | | | | | |
| gp130 associated protein GAM; Homo sapiens | | | | | |
| chromosome 19, cosmid F23613, complete sequence. | | | | | |
| amphiphysin (Stiff-Man syndrome with breast cancer | X81438 | 0.643 | 0.00039 | 0.640 | 0.0442 |
| 128 kD autoantigen) | | | | | |
| amphiphysin (Stiff-Man syndrome with breast cancer | U07616 | 0.627 | 0.00055 | | |
| 128 kD autoantigen) | | | | | |
| amyloid beta precursor protein (cytoplasmic tail) binding | D86981 | | | 0.697 | 0.0152 |
| protein 2 | | | | | |
| brain-derived neurotrophic factor | X60201 | 0.724 | 0.03351 | | |
| cadherin-like 22 | AF035300 | 0.665 | 0.00037 | | |
| calbindin 1, 28 kDa | NM_004929 | 0.633 | 0.00579 | | |
| calnexin | L10284 | 0.765 | 0.00335 | 0.744 | 0.0458 |
| Chrot-Leyden crystal protein | L01664 | 0.742 | 0.00000 | | |
| chromosome 11 open reading frame 8 | NM_001584 | 0.731 | 0.04126 | | |
| coated vesicle membrane protein | AK024976 | 0.729 | 0.00080 | | |
| coatomer protein complex, subunit beta 2 (beta prime) | X70476 | 0.741 | 0.02229 | 0.658 | 0.0395 |
| copine VI (neuronal) | AB009288 | 0.785 | 0.02239 | 0.770 | 0.0255 |
| development and differentiation enhancing factor 2 | AB007860 | 0.758 | 0.00386 | | |
| doublecortin and CaM kinase-like 1 | AB002367 | 0.698 | 0.02760 | | |
| drebrin 1 | D17530 | 0.763 | 0.00047 | | |
| dynein, axonemal, heavy polypeptide 9 | AJ404468 | 0.697 | 0.00726 | 0.698 | 0.0271 |
| dystrophin related protein 2 | U43519 | | | 0.706 | 0.0075 |
| early growth response 3 | X63741 | 0.594 | 0.00346 | 0.560 | 0.0345 |
| ephrin-B3 | U66406 | | | 0.659 | 0.0325 |
| fibroblast growth factor 12 | U66197 | 0.792 | 0.03240 | | |
| fibroblast growth factor 13 | NM_004114 | 0.755 | 0.04986 | | |
| fibroblast growth factor 7 (keratinocyte growth factor) | AI075338 | 0.706 | 0.02709 | | |
| GDP dissociation inhibitor 2 | Y13286 | | | 0.768 | 0.0228 |
| glutamate receptor, metabotropic 3 | X77748 | | | 0.780 | 0.0338 |
| growth arrest and DNA-damage-inducible, alpha | M60974 | 0.674 | 0.02750 | | |
| growth arrest-specific 2 | U95032 | 0.739 | 0.04722 | | |
| growth associated protein 43 | M25667 | 0.609 | 0.00029 | | |
| growth associated protein 43 | F02494 | 0.732 | 0.00127 | 0.686 | 0.0280 |
| growth factor receptor-bound protein 10 | D86962 | 0.782 | 0.03071 | | |
| Homo sapiens cDNA FLJ10863 fis, clone | AK001725 | 0.767 | 0.00400 | | |
| NT2RP4001575, highly similar to Rattus norvegicus | | | | | |
| mRNA for ARE1 protein. | | | | | |
| Homo sapiens vesicle trafficking protein sec22b mRNA, | AF047442 | 0.747 | 0.00253 | | |
| complete cds. | | | | | |
| human alpha-tubulin mRNA, 3′ end. | K00557 | | | 0.699 | 0.0312 |
| Human fibroblast growth factor homologous factor 4 | U66200 | | | 0.796 | 0.0404 |
| (FHF-4) mRNA, complete cds. | | | | | |
| huntingtin-associated protein interacting protein (duo) | NM_003947 | | | 0.731 | 0.0422 |
| inhibitor of DNA binding 2, dominant negative helix-loop- | M97796 | 0.798 | 0.00443 | | |
| helix protein | | | | | |
| insulin-like growth factor 1 receptor | X04434 | 0.729 | 0.00039 | | |
| kinesin family member 3C | AF035621 | 0.798 | 0.02051 | | |
| low density lipoprotein receptor (familial | NM_000527 | 0.631 | 0.00136 | 0.783 | 0.0408 |
| hypercholesterolemia) | | | | | |
| low density lipoprotein-related protein-associated protein | NM_002337 | 0.764 | 0.03547 | 0.639 | 0.0059 |
| 1 (alpha-2-macroglobulin receptor-associated protein 1) | | | | | |
| mannose-6-phosphate receptor (cation dependent) | M16985 | | | 0.696 | 0.0146 |
| mesoderm development candidate 2 | D42039 | | | 0.794 | 0.0371 |
| myelin basic protein | M13577 | 0.663 | 0.00000 | | |
| myelin protein zero (Charcot-Marie-Tooth neuropathy 1B) | D10537 | 0.670 | 0.01637 | | |
| N-ethylmaleimide-sensitive factor attachment protein, | AK023725 | 0.694 | 0.02659 | | |
| gamma | | | | | |
| neural precursor cell expressed, developmentally down- | AW960243 | 0.760 | 0.00108 | 0.662 | 0.0195 |
| regulated 8 | | | | | |
| neuropeptide FF-amide peptide precursor | AF005271 | | | 0.694 | 0.0479 |
| neuropilin 2 | AF016098 | | | 0.728 | 0.0146 |
| phosphotidylinositol transfer protein | D30036 | | | 0.767 | 0.0352 |
| piccolo (presynaptic cytomatrix protein) | AB011131 | 0.756 | 0.00877 | | |
| potassium voltage-gated channel, KQT-like subfamily, | AF074247 | | | 0.662 | 0.0316 |
| member 2 | | | | | |
| predicted protein of HQ2706; Homo sapiens PRO2706 | AF119891 | 0.799 | 0.02872 | | |
| mRNA, complete cds. | | | | | |
| protease, serine, 11 (IGF binding) | Y07921 | 0.720 | 0.00238 | | |
| protein tyrosine phosphatase, receptor-type, Z | M93426 | | | 0.666 | 0.0396 |
| polypeptide 1 | | | | | |
| protocadherin beta 10 | AF131761 | | | 0.650 | 0.0331 |
| protocadherin beta 2 | AF152495 | 0.795 | 0.00434 | | |
| putative; Human neurotrophin-3 (NT-3) gene, complete | M37763 | 0.658 | 0.01027 | | |
| cds. | | | | | |
| RAB33A, member RAS oncogene family | D14889 | 0.627 | 0.00128 | | |
| RAB4A, member RAS oncogene family | NM_004578 | 0.706 | 0.01831 | | |
| RAB5A, member RAS oncogene family | M28215 | 0.777 | 0.04868 | | |
| Rab9 effector p40 | Z97074 | 0.766 | 0.00313 | | |
| radixin | AL137751 | 0.013 | 0.78491 | | |
| Ras-like without CAAX 2 | U78164 | | | 0.501 | 0.0087 |
| Ras-like without CAAX 2 | Y07565 | 0.755 | 0.01070 | 0.495 | 0.0169 |
| retinoblastoma binding protein 7 | U35143 | 0.704 | 0.00153 | 0.662 | 0.0330 |
| Ric-like, expressed in neurons (Drosophila) | Y07565 | 0.735 | 0.00235 | | |
| Ric-like, expressed in neurons (Drosophila) | U78164 | 0.788 | 0.00528 | | |
| roundabout, axon guidance receptor, homolog 1 | AF040990 | | | 0.638 | 0.0301 |
| (Drosophila) | | | | | |
| scrapie responsive protein 1 | AJ224677 | | | 0.645 | 0.0295 |
| sema domain, seven thrombospondin repeats (type 1 and | U52840 | 0.765 | 0.02291 | | |
| type 1-like), transmembrane domain (TM) and short | | | | | |
| cytoplasmic domain, (semaphorin) 5A | | | | | |
| SH3-domain GRB2-like 2 | AF036268 | 0.648 | 0.00113 | 0.551 | 0.0297 |
| sorcin | M32886 | 0.738 | 0.00057 | 0.727 | 0.0218 |
| sorting nexin 1 | U53225 | 0.717 | 0.00549 | | |
| sorting nexin 3 | NM_003795 | 0.650 | 0.01372 | 0.555 | 0.0385 |
| sphingomyelin phosphodiesterase 1, acid lysosomal (acid | X59960 | | | 0.727 | 0.0143 |
| sphingomyelinase) | | | | | |
| stathmin-like 2 | D45352 | 0.675 | 0.04962 | 0.643 | 0.0381 |
| superoxide dismutase 1, soluble (amyotrophic lateral | X02317 | 0.714 | 0.01620 | 0.621 | 0.0488 |
| sclerosis 1 (adult)) | | | | | |
| synaptic glycoprotein SC2 | AAF32373 | 0.624 | 0.01686 | | |
| synaptojanin 1 | AB020717 | 0.705 | 0.01007 | | |
| synaptosomal-associated protein, 25 kD | D21267 | 0.662 | 0.00160 | | |
| syndecan binding protein (syntenin) | AF006636 | 0.695 | 0.00080 | | |
| syndecan binding protein (syntenin) | AF000652 | 0.649 | 0.00097 | | |
| syntaxin 8 | NM_004853 | 0.699 | 0.00152 | | |
| synuclein, alpha (non A4 component of amyloid | L08850 | 0.659 | 0.00127 | | |
| precursor) | | | | | |
| TGFB inducible early growth response | AF050110 | 0.756 | 0.03234 | | |
| transforming growth factor beta-stimulated protein TSC- | AJ222700 | 0.721 | 0.01087 | | |
| 22 | | | | | |
| tubulin, alpha, ubiquitous | AF141347 | | | 0.729 | 0.0273 |
| tyrosine 3-monooxygenase/tryptophan 5-monooxygenase | U54778 | 0.774 | 0.03442 | | |
| activation protein, epsilon polypeptide | | | | | |
| tyrosine 3-monooxygenase/tryptophan 5-monooxygenase | S80794 | 0.738 | 0.01748 | | |
| activation protein, eta polypeptide | | | | | |
| tyrosine 3-monooxygenase/tryptophan 5-monooxygenase | X56468 | 0.657 | 0.00126 | | |
| activation protein, theta polypeptide | | | | | |
| vesicle-associated membrane protein 3 (cellubrevin) | BE379661 | 0.769 | 0.02787 | | |
| voltage-dependent anion channel 1 | L06132 | 0.724 | 0.01818 | | |
| zinc finger protein 183 (RING finger, C3HC4 type) | X98253 | | | 0.780 | 0.0417 |
| zinc finger protein 45 (a Kruppel-associated box (KRAB) | L75847 | 0.624 | 0.04792 | 0.690 | 0.0215 |
| domain polypeptide) | | | | | |

[0055] TABLE 7
Binomial probabilities of some gene groups down
regulated by schizophrenia in dentate.

| | Number of | Number | Probability |
|---|---|---|---|
| Group | expressed genes | of hits | of the group⁽^{*}⁾ |
| Ubiquitin | 73 | 10 | 1.4e−2 |
| Ubiquinon | 33 | 7 | 3.5e−3 |
| ATP synthase | 24 | 10 | 7.0e−7 |
| Proteasome | 55 | 14 | 4.5e−6 |
| tyrosine 3-monooxygenase/ | 7 | 3 | 6.8e−3 |
| tryptophan | | | |
| 5-monooxygenase | | | |
| activation protein | | | |

⁽*⁾Hit probability of 0.0617 is assumed.

### EXAMPLE 2

### Deficient Expression of Proteasome, Ubiquitin, and Mitochondrial Genes in Hippocampal Neurons of Multiple Schizophrenia Patient Groups

[0056] This example describes additional experiment, in which laser-capture microdissection (LCM) and cDNA microarrays were used to discover gene expression differences in hippocampal neurons for two cohorts of normal controls and cases with schizophrenia. By “cohort” is meant a groups of individuals who share one or more characteristics in a research study and who are followed over time. The discovery of large clusters of co-directionally changing genes that encode for ubiquitin, the proteasome, and mitochondrial and neuronal functions in schizophrenia indicate that dentate gyrus neurons appear to under-express genes that are essential for normal cellular metabolism, protein processing, and neuronal functions.

[0057] Laser-captured hippocampal dentate granule neurons from two separate cohorts of normal controls and schizophrenics (9 and 8, cohort 1, and 14 and 15, cohort 2) were examined and compared with bipolar disease (8/group) and major depressive disorder cases (10/group). Group averages of the expression of human genes from the Agilent human 1 cDNA rnicroarray chip relative to a common pool of control samples were determined. Group expression intensities were independently calculated for representative genes using a polymerase chain reaction assay.

[0058] The microarray studies revealed in both schizophrenia cohorts decreases in large, overlapping clusters of genes that encode for protein turnover (i.e., proteasome subunits and ubiquitin), mitochondrial oxidative energy metabolism (i.e. isocitrate, lactate, malate, NADH and succinate dehydrogenases; cytochrome C oxidase and ATP synthase) and genes associated with neurite outgrowth, cytoskeletal proteins, and synapse plasticity. These changes were not obtained in cases with bipolar disorder or non-psychotic major depression, or in dentate neurons of rats treated chronically with clozapine. The changes were not associated with patient demographics including age, sex, brain weight, body weight, post-mortem interval, or drug history.

[0059] The decreases of genes involved with mitochondrial metabolism, proteasome function, and synaptic transmission in hippocampal neurons are highly consistent with functional brain imaging and other post-mortem measures in schizophrenia. Decreases in energy metabolism and protein processing of hypofunctioning hippocampal neurons allow our identification of drug discovery targets that can reverse the cognitive and sensory processing deficits of schizophrenia.

### Material and Methods

[0060] Human tissue: All post-mortem brain tissues used in the present study were obtained from the Stanley Medical Research Institute. The protocols for tissue collection and informed consent were approved by the Institutional Review Board of the Uniformed Services University of the Health Sciences (Torrey et al., 2000). Informed consent from each of the deceased subjects' next of kin was obtained for the use of brain tissue in scientific research. One set of brain sections was obtained from among the Neuropathology Consortium that consists of 60 individuals (n=15 in each of four groups; schizophrenia, bipolar disorder, depression and unaffected controls). A second set of sections was obtained from a cohort of Stanley Foundation non-consortium cases (n=9 schizophrenia and n=9 unaffected controls) and to these were added several samples from cohort 1 (Table 8) whose microarray images failed inclusion criteria in the first study. All cases were diagnosed according to DSM-IV criteria. Details regarding the SMRI brain collection, storage of tissue, and post-mortem diagnosis can be found in Torrey et al (Torrey et al., 2000). The balancing of samples between disease categories according to patient demographics including age, race, body weight, sex, sample pH, and postmortem interval is listed in Table 8.
[0061] Preparation of sections: Fourteen μm-thick frozen coronal sections that contained the hippocampus were thaw-mounted onto 1.5×3 inch gelatin-coated microscope slides and stored at −80° C. until use. All subsequent procedures, including neuron capture, RNA processing, and microarray hybridizations were conducted in a blind manner and processed in a counterbalanced order between the two or four diagnosis groups.
[0062] Cell capture: Each section was quick-thawed, fixed in 75% ethanol, re-hydrated in dH₂O and stained for two minutes with Arcturus Histogene™ staining solution. The sections were dehydrated in ascending ethanols, placed into xylene for five minutes and air-dried for 15 minutes. Approximately 2000-3000 Nissl-stained dentate granule neurons (FIG. 1) were consistently acquired from 2 or 3 slide-mounted tissue sections of the hippocampus of all cases using a PixCell II-e™ laser-capture microscope (Luo et al., 1999) (Arcturus, Mountain View, Calif.).
[0063] RNA amplification. The RNA of sections adjacent to those used for LCM revealed average 28S/18S ratios of 2.06±0.47 (X±SD). These ratios and normal ribosomal band intensities indicated that minimal RNA degradation occurred in these postmortem tissues, and that they were suitable for microarray studies (Bahn et al., 2001). Approximately 1 ng of mRNA extracted from the dentate granule cells of each case underwent two rounds of linear RNA amplification (Van Gelder et al., 1990; Eberwine et al., 1996) using the Arcturus RiboAmp kit (Mountain View, Calif.). This yielded approximately 1 μg and 138 μg of amplified RNA (aRNA) after the first and second round, respectively.
[0064] Expression profiling on Agilent cDNA microarrays: 400 ng of aRNA from each sample was reverse-transcribed using the Agilent direct-label cDNA synthesis kit (Palo Alto, Calif.) according to the manufacturer's directions, except that 400 ng of random hexamers was used to prime amplified RNA. Labeled cDNA was purified using QIAquick PCR purification columns (Qiagen, Valencia, Calif.), and concentrated by vacuum centrifugation. The cDNA was suspended in hybridization buffer and hybridized to Agilent Human 1 cDNA microarrays for 17 hours at 65° C. according to the Agilent protocol. Instead of randomly pairing samples from two cases for two channel cDNA arrays (Mirnics et al., 2000), each sample was labeled with cyanine-5 dye and co-hybridized to the same microarray with a common reference sample prepared from a pool of all control samples that was labeled with cyanine-3 dye. Arrays were washed and scanned using an Agilent scanner, using the default settings for cDNA arrays.
[0065] Microarray data analysis: RNA failures or poor microarray images occurred in several LCM samples in either experimental cohort. These failures were most commonly due to tissue processing, low amplification yields, and failed chips. The data analysis, therefore, consisted of only the best quality cDNA chips from the Neuropathology Consortium cases (n=9 control, n=8 schizophrenia, n=9 bipolar disorder and n=10 depression) and non-consortium cases (n=15 control and n=14 schizophrenia).

[0066] Signal intensities in both channels on all chips were normalized to the global mean of the experiment. Only those genes that produced a mean intensity of at least 300 in at least one of the sample groups were analyzed. For each gene, the log ratio value of each sample/reference was determined and the mean of each patient group was calculated. Logarithms of ratios, referred to as “log ratios”, are commonly used to process two-channel array data because the distribution of ratios is skewed (Quackenbush et al., 2002).
[0067] Statistical analysis: To calculate the fold change between the two groups, the mean log ratio of the control group was subtracted from the mean log ratio of the patient group. Raising 2 to the power of this remainder gives the fold change. The formula for computing a ratio of two values from the ratios of each value to a common reference is derived as follows. The common reference comprises a pool of all controlled samples used in the study. If A/R is the ratio of gene expression in schizophrenia to the reference and B/R is the ratio of normal to the reference, then:
   log(A/R)−log(B/R)=log(A)−log(R)−log(B)+log(R)=log(A/B)
   A/B=2^{log}^{₂}(A/B)

[0068] The Welch t-test was used to evaluate the statistical significance of disease effects on gene expression. The p values were computed using the t test function implemented in the R statistical software package (See r-project.org on the WorldWideWeb and Venables et al., 2002), with two sets of binary logarithms of sample/reference ratios as the input, e.g., schizophrenia vs. reference and normal vs. reference. Since we were primarily interested in the contrasts between disease cases and normal cases, we have separately compared each disease group to the normal group. t tests are commonly used for such comparisons in the analysis of microarray data (Slonim et al., 2002).

[0069] Some of the genes that showed a change in expression levels between diseased and control samples were grouped according to their biological function using the EASE routine and with internally-produced algorithms based on binomial probability computation (Table 9). Such groupings increase confidence in the results when the proportion of genes that change within a group is significantly greater than the proportion of such genes on the entire chip. For example, 10,159 gene probes on the Agilent chip showed a sufficient signal to be considered expressed in the second cohort. About 7.5% of those were altered in schizophrenia, as determined by the criteria of greater than 1.25-fold change and a t test p value less than 0.05. Some of these changes are probably random artifacts due to multiple testing. However, if we identify by name a group of genes that are related to a particular function, such as the proteasome, we see that 32% of them are affected, as determined by the same criteria. The binomial probability computation was used to estimate the probability that such a concentration of “hits” in a particular group of genes could have occurred by chance. Because the size of a functional group of genes is much smaller than the total number of probes on the chip, the binomial probability computation results in p values similar to those obtained with the alternative method, the Fisher exact test used for similar purposes in the EASE (Hosacket al., 2003) and GoMiner software (Zeeberg et al., 2003). The binomial probability computation test is implemented in the R software package (See r-project.org on the Worldwideweb and Venables et al., 2002).
[0070] Validation by RT-PCR: Total RNA from ˜2000 re-captured dentate neurons for each sample was subjected to DNase treatment in a 10 μl reaction containing 1 μl 10× DNase I reaction buffer, and 1 Unit DNase I (Invitrogen, Carlsbad, Calif.). The reaction was carried out at room temperature for 10 minutes. One μl of EDTA (25 mM) and 1 μl of random primers (500 μg/ml, Promega, Madison, Wis.) were added to DNase reaction and heated to 70° C. for 15 minutes to simultaneously inactivate the DNase I enzyme and eliminate RNA secondary structure to allow random primer annealing. The sample was placed on ice for two minutes and collected by brief centrifugation. The RNA in the sample was reverse-transcribed into cDNA by the addition of 8 μl of master mix containing 4 μl of 5× first strand buffer, 2 μl DTT (0.1 M), 1 μl dNTP's (10 mM each), and 1 μl SuperScript II (200 U/μl) (Invitrogen, Carlsbad, Calif.), followed by incubation at 42° C. for 45 minutes. The RT reaction was diluted approximately 10-fold with dH₂O and stored at 4° C.

[0071] Diluted cDNA (5 μl) added to a 45 μl PCR reaction mixture containing 25 μl of 2× Univeral TaqMan® PCR Master Mix (Applied Biosystems, Foster City, Calif.), 45 picomole of forward and reverse primer, and between 5 and 15 picomole of fluorescently-labeled probe for each specific gene tested. Each sample was subjected to 40 cycles of real time PCR (ABI PRISM® 7900HT, Applied Biosystems, Foster City, Calif.). Fluorescence was measured during each cycle of 2-step PCR alternating between 95° C. for 15 seconds and 60° C. for 1 minute. The threshold cycle (Ct), or cycle number at which signal fluorescence exceeds a preset fluorescence threshold, was compared to a standard curve generated by six, 10-fold serial dilutions of a concentrated reference cDNA standard (prepared from a pool of all control samples). The expression values for each gene were normalized to the average expression levels of three control genes: beta-2-microglobulin (B2M), Dusty protein kinase (DustyPK), and KIAA0582 (an EST). These genes are moderately expressed in dentate granule cells, were unchanged by microarray analysis, and were confirmed to be unchanged by RT-PCR. The normalized relative expression values for all control and treated samples were averaged, and a Student's t test was performed to calculate the statistical significance between these groups.

### Results

[0072] Each microarray was co-hybridized with cyanine-5 labeled cDNA from a case and cyanine-3 labeled cDNA from a pool of all control samples. These two labels allowed the abundance of each gene to be determined for each sample relative to that of the pooled control group (FIG. 2). The average fold change for the bipolar and depression groups relative to the normal group appeared to deviate little from the unity line across a 1000-fold range of gene intensities, and produced gene changes at chance levels regardless of p value. In contrast, the expression of many genes in the schizophrenic cases deviated to a greater extent than in the bipolar or depression cases, and many genes changed significantly from those of the normal controls in the first cohort (n=8-10/group; FIG. 2). A very similar and significant deviation in gene expression from controls occurred in the second cohort of schizophrenic patients (n=14-15/group; data not shown). In each schizophrenia cohort, the incidence of significantly altered genes occurred two- to three-times more frequently than would be expected by chance, at p values of 0.05 and 0.005. Also mitigating against a random nature of these gene changes in schizophrenia was our ability to replicate in the two cohorts many of the decreasing and increasing genes (FIG. 3). Six hundred fifty-six genes were down-regulated in cohort 1, compared to 844 down-regulated genes in cohort 2. Two hundred thirty-seven of these, representing 36% of the down-regulated genes in cohort 1, were also down-regulated in cohort 2. Two hundred ninety seven genes were up-regulated in schizophrenic cases from cohort 1, and 713 genes were up-regulated in cohort 2. Eighty-four of these genes, representing 28% of the up-regulated genes in cohort 1, were replicated in cohort 2. These overlaps were 7- to 5-fold more prevalent than the 5% overlap that would be expected by chance. The fact that over 95% of the genes that changed in both cohorts were co-directional greatly increases the reliability of these findings.

[0073] Large sets of genes that decreased in each schizophrenia cohort could be readily grouped into common functional classes. These groupings were independently confirmed by an analysis of changes in gene families using the EASE routine and through programs based upon binomial probabilities (Table 9). The calculation of p values was well below 0.05, such as 10⁻³ to 10⁻⁷, and consistent identification of a common category with the same direction of change in the two cohorts (Table 9), is strong evidence that the effect is distinct and reproducible. For example, among the 57 probes on the Agilent cDNA chip that encode for the proteasome macromolecular complex, 18 were decreased in schizophrenia in the second cohort of cases, (p<0.05,>1.5 fold change). Among the 77 genes on the Agilent chip that encode for members of the ubiquitin pathway, 19 were decreased, while 6 out of the 33 genes that encode for the ubiquinone complexes I-V of the mitochondria were decreased.

[0074] Age, sex, brain pH, brain weight, and body weight (Table 8), and other variables (Torrey et al., 2000) were equally distributed between the normal control and psychiatric cases. Long post-mortem intervals in 3 schizophrenic cases in cohort 1 and in 2 schizophrenic cases in cohort 2 accounted for non-significant but somewhat higher average values compared to controls. Removing these patients had little if any affect the numbers or kinds of genes found to be altered in schizophrenia. Nevertheless, it remained possible that gene expression could vary with one or more of the demographic variables (Vawter et al., 2001; Bahn et al., 2001; Li et al., 2004; Kingsbury et al., 1995; Lehrmann et al., 2003). The variance in gene expression in the normal controls and schizophrenic cases was therefore evaluated by a simple additive model for which the variance of the Log Ratio is a function of the variance contributed by the following factors: Disease, Brain pH, Brain Weight, PMI , Age, Sex, and Body Weight. This model was included in an analysis of variance (ANOVA) of 263 genes that were found by t test to be changed in both cohorts. In this analysis, 44 cases (22 control and 22 schizophrenics) were studied. Numeric factors, such as age (25 to 68 years), PMI (6 to 112 h), brain pH (5.8 to 6.8), brain weight (1260 to 1980 g), body weight (126 to 325 lb), were divided evenly into 5 sub groups. Each sub group was considered as a distinct level for each factor in ANOVA analysis. A histogram of the number of genes whose variance changed as a function of p value of each demographic factor (FIG. 4) revealed how much each factor contributed to the variance in gene expression for the 263 genes. Disease accounted for the majority of variance in gene expression, followed by brain pH and even lesser still, brain weight. Neither post-mortem interval, age, sex (FIG. 4), nor body weight (not shown) contributed to any more than a chance distribution of variability in gene expression.

[0075] An ANOVA for the 263 genes was conducted using a model that evaluated the contributions of disease or brain pH to gene variance in both cohorts, according to the model for which the variance in the Log Ratio is a function of the variance contributed by the following factors: Disease and Brain pH. The variance of 70% ofthese genes was not associated with pH in either cohort (data not shown). A significant association with pH was obtained for 20% of the genes in the first cohort, 8% in the second, and only 2% in both. Consistent with the results of the multifactorial ANOVA, the variance of 80% of the genes was associated with disease only in either or both cohorts.

[0076] Many of the 263 genes that decreased in both schizophrenia cohorts could be readily grouped into the same functional classes identified by the EASE and binomial routines (Table 9). These included genes encoding for mitochondria and energy metabolism, such as complex I through IV and mitochondrial ATPase (Table 10), and the proteasome and ubiquitin functions (Table 11). Genes important in neuronal plasticity (Table 12) were not identified as a single class by the EASE routine. The TaqMan RT-PCR evaluation of recaptured dentate neurons from 22 control and 22 schizophrenic cases confirmed the changes in 14 of the 20 genes representative of the mitochondria, neuronal plasticity, proteasome, and ubiquitin categories (Table 13). All genes identified as significantly altered in schizophrenia relative to normal controls (n=10/13/group) are listed in Table 14.

[0077] Little contribution of antipsychotic treatments to the gene changes in schizophrenia was suggested by use of five sets of observations. Using the Pearson correlation coefficient test, no significant correlation was obtained between the relative change in expression levels of the 263 genes that changed in both cohorts and the cumulative lifetime antipsychotic exposure of the cases.

[0078] Second, antipsychotics were also taken by the bipolar cases and, though doses were lower than those of the schizophrenics (Table 8), the gene changes in the bipolar cases failed to exceed chance levels or show significant overlap with the schizophrenics. Third, among the cases in both cohorts, three schizophrenics who were medication-free from several weeks to over 30 years prior to death contributed about equally to the gene changes we observed. This is illustrated by arrows for 4 genes representative of the mitochondrial, proteasome, and ubiquitin functions (FIG. 5). Fourth, the pharmacologically complex antipsychotic drug, clozapine, was used by half of the schizophrenic patients, yet a segregation of patients into those who were and were not administered clozapine produced no apparent segregation of changes for these four genes, as evidenced by their random distribution among the expression values for schizophrenic cases.

[0079] The potential contributions of antipsychotic treatments to the gene changes in schizophrenic hippocampal dentate granule neurons were further evaluated in male Sprague-Dawley rats (10/group) that received a daily intraperitoneal injection for 21 days of the saline vehicle (10 ml/kg) or clozapine (30 mg/kg). Rats were sacrificed 24 hours after the last injection because this post-injection duration was found to change the expression of more genes compared to a 2 hr survival after clozapine. Hippocampal dentate granule neurons were captured by LCM and processed identically to the human material, using one Agilent 60-mer rodent oligo microarray chip per sample. Compared to vehicle-treated rats, and more than seen with a single clozapine injection, the chronic clozapine-treated rats showed a change in the expression of far more genes than would be expected by chance. However, very few of these genes changed in the same direction as in the dentate granule cells of the schizophrenic cases. Using Locus Link ID numbers for the Agilent human 1 cDNA and Agilent 60-mer rodent oligo microarray chip, 2084 pairs of genes were identified as common to these two chips. Sixty-five of these common genes were among the 263 genes that changed in both cohorts. Among these 65 genes, 15 (23%) changed in the dentate granule neurons from both cohorts and the chronic clozapine-treated rats (p<0.05). Only one of these, proteasome (prosome, macropain) subunit, beta type, 6, is present in Table 10, 11 or 12. The remaining 14 genes were from a longer list of genes that were not among the classes represented in these tables. Interestingly, the proteasome gene was among 4 of the 15 genes that increased in response to clozapine but was decreased in schizophrenia.

Specificity of Gene Changes to Schizophrenia

[0080] The gene expression changes described here are disease-specific to schizophrenia for several reasons. First, these changes were not seen in cases with bipolar disease or depression, for which gene expression changes did not exceed chance levels. Also, the gene changes in schizophrenia are not associated with drug abuse or medications. A history of alcohol abuse or dependence was reported for only two of the schizophrenics from the consortium cases but was present in six of the 10 bipolar cases, 4 of the 10 depressed cases, and in several of the control cases. The lack of an alcohol-related effect in generating the changes observed in schizophrenia is important because chronic alcohol abuse or dependence affects mitochondrial, ubiquitin, and proteasome genes in the temporal cortex (Sokolov et al., 2003). While some of these genes overlapped with the consistently down-regulated genes reported here, many of them are increased by alcohol (Sokolov et al., 2003). The lack of concomitant medication effects on the disease signature reported here is also suggested by the fact that three patients who were medication-free from several weeks to over 30 years prior to death contributed about equally to the gene changes observed. Also, the cumulative lifetime antipsychotic exposure of the cases did not correlate with the number of gene changes, and chronic clozapine failed to affect gene homologues in rat dentate granule neurons. Based on these results, and because no other psychiatric drug besides clozapine was given to more than a few of the schizophrenic patients, the possibility of a contribution by concomitant drugs or medications to the gene expression changes observed here can be safely dismissed.

[0081] Another demographic variable that has been reported to correlate with brain mRNA expression is brain tissue pH (Li et al., 2004; Kingsbury et al., 1995; Johnston et al., 1997; Harrison et al., 1995). Because of this observation, brain pH was counterbalanced between all groups in the present studies, and brain tissue pH was found to have contributed little to the statistical significance of the gene changes reported here. However, the change in so many genes involved in proton transport suggests that a physiological relationship may exist between brain tissue pH and the degree of gene change. Interestingly, the relatively small number of gene expression changes that correlate with pH were positively correlated, such that their expression decreased with decreases in brain tissue pH. A similar positive correlation has been identified in the brains of non-psychiatric individuals (Li et al., 2004; Kingsbury et al., 1995; Johnston et al., 1997; Harrison et al., 1995), where lower pH was associated with decreases in gene expression and RNA quality. However, the patients that contributed the most to these relationships in those studies (Li et al., 2004; Kingsbury et al., 1995; Johnston et al., 1997; Harrison et al., 1995) experienced prolonged agonal conditions of anoxia, respiratory arrest, or coma. In contrast, samples in the study reported herewere included only if they were obtained from patients who did not experience such prolonged agonal stress, contained RNA of equal, high quality across the groups, and were balanced for brain pH. It is possible that the decreases in brain pH and gene expression are related at a physiological level, since many of the genes that showed this co-variation are involved in mitochondrial proton transport.

[0082] Cigarette smoking could also be a factor in the gene changes we saw, as it could alter tissue pH or affect genes linked to nicotinic receptor mechanisms. Smoking data is available for 75% of the cases in cohort 1 and for 65% of the cases in cohort 2. In each diagnostic group of these cohorts, however, the proportion of cases that definitely smoked at the time of death was similar. Thus any effect of smoking would probably have affected gene expression equally across diagnostic groups. Furthermore, there was no significant difference in pH levels between those cases that smoked at the time of death and those that did not smoke, nor did pH vary significantly between diagnostic groups.

[0083] The gene signatures of the present invention can be used to determine if an individual is afflicted with schizophrenia. The determination can be made by conducting an analyses of the patient's genes to determine if any of the gene signatures SEQ ID NOS: 1-249 of the present invention are present

### Discussion and Conclusions

[0084] The most consistent and robust gene decreases are those of the various proteasome subunits and for ubiquitin, including ubiquitin-conjugating enzymes. Neuronal ubiquitin (Murphey et al., 2002; Hegde et al., 2002), proteasome (Pak et al., 2003) and the ubiquitin-proteasome system (Ehlers et al., 2003; Speese et al., 2003) control the assembly, connectivity, function, and signaling of the synapse, including regulation of ligand-gated neurotransmitter internalization and turnover of pre- and postsynaptic proteins (Ehlers et al., 2003; Speese et al., 2003). Our observations of decreases in many genes that encode for neuronal plasticity and synaptic functions are consistent with the many reports of synaptic pathology in schizophrenia including microarray-based studies of the frontal cortex (Mimics et al., 2000; Vawter et al., 2001; Bahn et al., 2001; Knable et al., 2001; Hemby et al., 2002). The ability of proteasome inhibitors to deplete neuronal energy reserves and increase neuronal vulnerability to free radical-generators (Hoglinger et al., 2003) suggests that impaired ubiquitin/proteasome functions may weaken the hippocampal synapse by compromising both energy production and synaptic functions (FIG. 6).

[0085] The chronic administration of clozapine, haloperidol, or fluphenazine, increases some of the same genes that were decreased in schizophrenia. These include cytochrome C oxidase, which is increased in the hippocampus and frontal cortex of rats treated with these drugs (Prince et al., 1997(a); Prince et al., 1998; Prince et al., 1997(b)), and whose decrease by the psychotomimmetic drugs PCP or methamphetamine is prevented by clozapine and fluphenazine (Prince et al., 1997(b); Prince et al., 1998). Haloperidol enhances and normalizes the utilization of glucose (Holcomb et al., 1996; Desco et al., 2003) and N-acetylasparate (Bertolino et al., 2001) in the schizophrenic brain. Thus, increases in mitochondrial function and glucose utilization may contribute to the therapeutic efficacy of antipsychotic drugs. This hypothesis is supported by the ability of glucose consumption to reverse some of the cognitive deficits in schizophrenia (Stone et al., 2003; Dwyer et al., 2003).

[0086] Others have proposed that mitochondrial dysfunction may explain the psychopathology of schizophrenia (Marchbanks et al., 1995; Maurer et al., 2001; Ben-Shachar et al., 2002). This hypothesis is based on decreases in electron transport by cytochrome oxidase and cytochrome C reductase in medicated and unmedicated schizophrenics (Maurer et al., 2001; Whatley et al., 1996; Cavelier et al., 1995). Decreases in these same genes were confirmed in the present report. The many other decreases in genes involved in electron transport and mitochondrial function support a significant role for hippocampal mitochondrial dysfunction in schizophrenia. These decreases are consistent with decreased energy metabolism, glucose utilization (Tamminga et al., 1992; Dickey et al., 2002; Bertolino et al., 1996; Buchsbaum et al., 1990; Nudmamud et al., 2003), and neuronal metabolism in the hippocampus of live schizophrenic patients (Fannon et al., 2003; Bertolino et al., 1996), including decreases in cytochrome c oxidase in post-mortem striatum (Prince et al., 2000). Intellectual and emotional impariments, but not motoric impairments, of schizophrenics correlate strongly and significantly with decreases in striatal cytochrome oxidase (Prince et al., 2000) and with depressed cortical glucose utilization (Buchsbaum et al., 2002). Our findings are also consistent with the 20-30% decreased number of mitochondria in striatal neurons (Kung et al., 1999) and mitochondrial number and volume of striatal and frontal cortex oligodendroglia in schizophrenia (Uranova et al., 2001). These mitochondrial decreases, and the 20-35% decreases in the expression of mitochondrial genes reported here, might be expected to impair overall mitochondrial function. Deficits in mitochondrial metabolism and glucose utilization of dentate gyrus neurons could also result from deficiencies in the depolarizing influences of excitatory glutamatergic (Tsai et al., 1995) or acetylcholinergic inputs (Freedman et al., 2000) proposed for schizophrenia. This scheme is summarized in FIG. 6. A study of whether the gene decreases in schizophrenia can be mimicked in rats by glutamatergic or cholinergic deafferentation could help answer this question and help identify novel pharmacological targets for therapeutic intervention.

[0087] Structural and functional deficits of the hippocampus are well-documented in schizophrenia (Benes et al., 2000; Jessen et al., 2003; Tamminga et al., 1992; McCarley et al., 1999; Fannon et al., 2003; Bertolino et al., 1996; Weinberger et al., 1999; Arnold et al., 1996; Velakoulis et al., 2001; Freedman et al., 2000; Buchsbaum et al., 2002; Knable et al., 2004; Lauer et al., 2003). The impairments in cognition, attention, affect, and working memory are relatively persistent features of this disorder and are believed to result in part from hippocampal neuron dysfunction (Weinberger, 1999; Bertolino et al., 2001). Abnormalities of hippocampal dentate granule and CA3 pyramidal neurons (Arnold et al., 1996; Byne etal., 2002; Harrison et al., 1999; Freedman et al., 2000) point to their likely involvement in the cognitive, mnemonic, and affective components of schizophrenia (Benes et al., 2000; Weinberger et al., 1999). Indeed, schizophrenia is perhaps best-characterized by the early-appearing and persisting deficits in cognition, attention, affect, and working memory, recognized by Kraeplin and Bleuler as “dementia praecox” (Kraeplin et al., 1971; Bleuler et al., 1950). It is reasonable to speculate that such deficits in cognitive functions could result from metabolic and protein processing deficits in brain areas like the hippocampus. It remains to be seen whether other homogeneous populations of brain neurons, such as those in the frontal cortex, will demonstrate similar alterations in gene expression as reported described here. A very recent study identified deficits in mitochondrial gene and protein levels in schizophrenia frontal cortex (Bahn et al., 2004). The present results provide a genomic profile of schizophrenia in which hippocampal neurons contain less MRNA for the basic biochemical functions of energy and protein metabolism, and neuronal plasticity. The discovery of compounds that produce a reciprocal change in these same genes may yield novel antipsychotics that address at least some of the core deficits of schizophrenia.

TABLE 8

| | | | | | | Brain | Body | Lifetime |
|---|---|---|---|---|---|---|---|---|
| | | | | | Brain | Weight | Weight | Antipsychotics |
| Description | Case ID # | Age | Sex | PMI | pH | (g) | (g) | (mg) |
| COHORT 1 | | | | | | | | |
| Control | 1 | 53 | M | 28 | 6.2 | 1400 | 133 | 0 |
| Control | 2 | 44 | M | 10 | 6.4 | 1510 | 198 | 0 |
| Control | 3 | 41 | M | 11 | 6 | 1305 | | 0 |
| Control | 4 | 42 | M | 27 | 6.6 | 1500 | 280 | 0 |
| Control | 5 | 57 | F | 26 | 6 | 1400 | 154 | 0 |
| Control | 6 | 52 | M | 28 | 6.5 | 1700 | 191 | 0 |
| Control | 7 | 44 | F | 25 | 6.3 | 1490 | 259 | 0 |
| Control | 8 | 59 | M | 26 | 6.4 | 1560 | 176 | 0 |
| Control | 9 | 52 | M | 8 | 6.5 | 1840 | 188 | 0 |
| Average | | 49.3 | 7M/2F | 21 | 6.3 | 1523 | 197 | 0 |
| Stdev | | 6.7 | | 8.6 | 0.2 | 163 | 50 | 0 |
| Schizophrenic | 10 | 56 | F | 12 | 6.4 | 1420 | 142 | 150000 |
| Schizophrenic | 11 | 30 | F | 60 | 6.2 | 1430 | 141 | 6000 |
| Schizophrenic | 12 | 52 | M | 61 | 6 | 1530 | 174 | 9000 |
| Schizophrenic | 13 | 30 | M | 32 | 5.8 | 1620 | 199 | 50000 |
| Schizophrenic | 14 | 62 | F | 26 | 6.1 | 1270 | 135 | 50000 |
| Schizophrenic | 15 | 60 | M | 31 | 6.2 | 1340 | 158 | 80000 |
| Schizophrenic | 16 | 32 | M | 19 | 6.1 | 1590 | 234 | 15000 |
| Schizophrenic | 17 | 25 | M | 32 | 6.6 | 1555 | 132 | 4000 |
| Average | | 43.4 | 5M/3F | 34.1 | 6.2 | 1469 | 164 | 45500 |
| Stdev | | 15.5 | | 17.7 | 0.2 | 125 | 36 | 50279 |
| Bipolar Disorder | 18 | 25 | F | 24 | 6.4 | 1540 | 157 | 7500 |
| Bipolar Disorder | 19 | 48 | F | 22 | 5.8 | 1260 | 189 | 32000 |
| Bipolar Disorder | 20 | 37 | F | 29 | 6.5 | 1130 | 106 | 1250 |
| Bipolar Disorder | 21 | 57 | M | 19 | 6.2 | 1140 | 193 | 60000 |
| Bipolar Disorder | 22 | 34 | M | 23 | 6.3 | 1523 | 184 | 7000 |
| Bipolar Disorder | 23 | 48 | M | 13 | 6.1 | 1540 | 173 | 200 |
| Bipolar Disorder | 24 | 31 | M | 28 | 6.3 | 1680 | 210 | 30000 |
| Bipolar Disorder | 25 | 50 | M | 19 | 6.2 | 1380 | 208 | 60000 |
| Bipolar Disorder | 26 | 50 | F | 62 | 6.3 | 1320 | 265 | 0 |
| Average | | 42.2 | 5M/3F | 26.6 | 6.2 | 1424 | 187 | 21994 |
| Stdev | | 10.7 | | 14.2 | 0.2 | 169 | 43 | 24691 |
| Depressed | 27 | 44 | F | 32 | 6.2 | 1410 | 123 | 0 |
| Depressed | 28 | 65 | M | 19 | 6.2 | 1360 | 179 | 0 |
| Depressed | 29 | 52 | M | 12 | 6.5 | 1520 | 247 | 0 |
| Depressed | 30 | 42 | F | 25 | 6.3 | 1340 | 136 | 0 |
| Depressed | 31 | 51 | M | 26 | 6.3 | 1550 | 193 | 0 |
| Depressed | 32 | 42 | M | 7 | 6.2 | 1350 | 227 | 0 |
| Depressed | 33 | 56 | M | 23 | 6.5 | 1240 | 198 | 0 |
| Depressed | 34 | 30 | F | 33 | 6 | 1400 | 130 | 0 |
| Depressed | 35 | 43 | M | 43 | 5.9 | 1460 | | 0 |
| Depressed | 36 | 47 | M | 28 | 6.4 | 1740 | 208 | 0 |
| Average | | 47.2 | 7M/3F | 24.8 | 6.3 | 1437 | 182 | 0 |
| Stdev | | 9.5 | | 10.4 | 0.2 | 140 | 44 | 0 |
| COHORT 2 | | | | | | | | |
| Control | 37 | 48 | M | 12 | 6.25 | 1370 | 234 | 0 |
| Control | 38 | 52 | M | 22 | 6.2 | 1330 | 156 | 0 |
| Control | 39 | 35 | F | 23 | 6.6 | 1340 | 126 | 0 |
| Control | 40 | 54 | M | 22 | 6.78 | 1510 | 212 | 0 |
| Control | 41 | 56 | M | 24 | 6.72 | 1500 | 258 | 0 |
| Control | 42 | 35 | F | 40 | 5.8 | 1560 | 146 | 0 |
| Control | 43 | 68 | F | 13 | 6.3 | 1360 | 136 | 0 |
| Control | 44 | 58 | M | 27 | 6 | 1780 | 186 | 0 |
| Control | 45 | 29 | F | 42 | 6.2 | 1440 | | 0 |
| Control | 46 | 56 | M | 36 | 6.62 | 1980 | 199 | 0 |
| Control | 47 | 49 | M | 46 | 6.5 | 1605 | 220 | 0 |
| Control | 48 | 48 | M | 17 | 6.69 | 1600 | 268 | 0 |
| Control | 49 | 48 | M | 12 | 6.51 | 1410 | 296 | 0 |
| Control | 50 | 34 | M | 23 | 6.79 | 1700 | 265 | 0 |
| Control | 51 | 38 | M | 6 | 6.71 | 1460 | 219 | 0 |
| Average | | 47.2 | 11M/4F | 24.3 | 6.4 | 1530 | 209 | 0 |
| Stdev | | 10.9 | | 12 | 0.3 | 182 | 53 | 0 |
| Schizophrenic | 52 | 44 | M | 50 | 6.5 | 1640 | 172 | 100000 |
| Schizophrenic | 53 | 58 | M | 74 | 6.82 | 1835 | 192 | 30000 |
| Schizophrenic | 54 | 44 | M | 29 | 5.9 | 1500 | 260 | 130000 |
| Schizophrenic | 55 | 35 | M | 35 | 6.5 | 1380 | 325 | 50000 |
| Schizophrenic | 56 | 32 | M | 24 | 6.59 | 1440 | 241 | 40000 |
| Schizophrenic | 57 | 40 | M | 70 | 6.62 | 1500 | 188 | 140000 |
| Schizophrenic | 58 | 45 | F | 52 | 6.51 | 1510 | 180 | 20000 |
| Schizophrenic | 59 | 49 | F | 38 | 6.2 | 1260 | 215 | 150000 |
| Schizophrenic | 60 | 57 | M | 20 | 6.66 | 1590 | 222 | 0 |
| Schizophrenic | 61 | 44 | F | 30 | 6.55 | 1480 | 148 | 200000 |
| Schizophrenic | 62 | 35 | M | 9 | 6.44 | 1415 | 128 | 180000 |
| Schizophrenic | 63 | 32 | M | 112 | 6.59 | 1550 | 158 | 1000 |
| Schizophrenic | 64 | 60 | F | 40 | 6.2 | 1395 | 264 | 0 |
| Schizophrenic | 65 | 31 | M | 14 | 5.8 | 1555 | 284 | 4000 |
| Average | | 43.3 | 10M/4F | 42.6 | 6.4 | 1504 | 213 | 74646 |
| Stdev | | 9.9 | | 27.6 | 0.3 | 136 | 57 | 72756 |

[0088] TABLE 9

| | Cohort 1 | | | | Cohort 2 | | | |
|---|---|---|---|---|---|---|---|---|
| | Binomial | Binomial | EASE | EASE | Binomial | Binomial | EASE | EASE |
| | Score | Bonf. | Score | Bonf. | Score | Bonf. | Score | Bonf. |
| Proteasome | 4.5E−06 | 4.1E−02 | 1.0E−03 | 1 | 1.1E−07 | 1.20E−03 | 8.1E−04 | 1 |
| (Proteasome Complex) | | | | | | | | |
| Ubiquitin (Ubiquitin- | 1.4E−02 | 1 | 4.6E−02 | 1 | 3.3E−06 | 3.60E−02 | 1.1E−02 | 1 |
| dependent protein | | | | | | | | |
| catabolism) | | | | | | | | |
| Ubiquinone | 3.5E−03 | 1 | | | 3.5E−02 | 1 | | |
| ATP synthase | 7.0E−07 | 6.4E−03 | | | 1 | 1 | | |
| Energy pathways | | | 1.2E−07 | 1.8E−04 | | | 4.3E−05 | 8.4E−02 |
| Mitochondrion | | | 1.3E−07 | 1.9E−04 | | | 1.3E−11 | 2.6E−08 |

[0089] TABLE 10

| | Vendor | | | | | |
|---|---|---|---|---|---|---|
| Gene Probe | Probe | Accession | Cohort 1 | | Cohort 2 | |
| ID | ID | Number | Ratio | P value | Ratio | P value |
| 12458 | 3888832 | D90228 | 0.77 | 0.016 | 0.66 | 0.013 |
| 4755 | 1634342 | AW873466 | 0.67 | 0.004 | 0.72 | 0.040 |
| 751 | 1901073 | AF032455 | 0.69 | 0.002 | 0.66 | 0.041 |
| 5267 | 1459967 | X76228 | 0.67 | 0.001 | 0.70 | 0.035 |
| 597 | 4900592 | U83411 | 1.26 | 0.019 | 1.23 | 0.045 |
| 11907 | 1619292 | AK026633 | 0.72 | 0.045 | 0.65 | 0.017 |
| 6731 | 3585709 | M16462 | 0.80 | 0.014 | 0.80 | 0.040 |
| 11212 | 1519369 | AF112219 | 0.62 | 0.023 | 0.74 | 0.037 |
| 4326 | 3126072 | L32977 | 0.66 | 0.008 | 0.64 | 0.026 |
| 5610 | 3986667 | M59783 | 0.69 | 0.006 | 0.62 | 0.021 |
| 5930 | 1573840 | X83464 | 0.77 | 0.002 | 0.76 | 0.039 |
| 1541 | 3490376 | M25161 | 1.23 | 0.028 | 1.20 | 0.038 |
| 9415 | 2054607 | U07681 | 0.72 | 0.008 | 0.76 | 0.036 |
| 2983 | 4372330 | AK026515 | 0.65 | 0.004 | 0.66 | 0.040 |
| 1922 | 1977053 | AW249275 | 0.62 | 0.002 | 0.58 | 0.011 |
| 2583 | 2899863 | AF067166 | 0.74 | 0.005 | 0.71 | 0.043 |
| 10456 | 2467357 | AF047181 | 0.70 | 0.020 | 0.68 | 0.041 |
| 418 | 2935594 | AF020351 | 0.69 | 0.017 | 0.59 | 0.012 |
| 8148 | 1986109 | U30255 | 0.75 | 0.014 | 0.72 | 0.007 |
| 3715 | 4421909 | J04173 | 0.60 | 0.004 | 0.64 | 0.040 |
| 9177 | 1903759 | AW959460 | 0.78 | 0.036 | 0.57 | 0.004 |
| 880 | 1741214 | NM_000925 | 0.76 | 0.042 | 0.64 | 0.048 |
| 14 | 644927 | AI332708 | 0.65 | 0.012 | 0.70 | 0.043 |
| 1568 | 3745348 | J02683 | 0.67 | 0.010 | 0.63 | 0.029 |
| 4204 | 3804843 | L21936 | 0.72 | 0.012 | 0.71 | 0.037 |
| 2191 | 2458933 | AW247564 | 0.69 | 0.024 | 0.58 | 0.019 |

[0090] TABLE 11

| Gene | Vendor | | | | | |
|---|---|---|---|---|---|---|
| Probe | Probe | Accession | Cohort 1 | | Cohort 2 | |
| ID | ID | Number | Ratio | P value | Ratio | P value |

Proteasome

| | | | | | | |
|---|---|---|---|---|---|---|
| 10492 | 1488021 | AF006305 | 0.78 | 0.027 | 0.63 | 0.040 |
| 1045 | 2123183 | BE271628 | 0.76 | 0.028 | 0.65 | 0.036 |
| 11991 | 1872245 | D38047 | 0.68 | 0.008 | 0.69 | 0.046 |
| 3002 | 2057812 | AB003177 | 0.74 | 0.003 | 0.72 | 0.011 |
| 9466 | 2211625 | AA310524 | 0.69 | 0.021 | 0.74 | 0.005 |
| 5380 | 2195309 | AI889267 | 0.72 | 0.019 | 0.53 | 0.005 |
| 9595 | 2989852 | BE264172 | 0.67 | 0.006 | 0.56 | 0.024 |
| 1497 | 4534748 | D29012 | 0.68 | 0.009 | 0.61 | 0.023 |
| 1513 | 5161001 | D29012 | 0.73 | 0.002 | 0.58 | 0.009 |

Ubiquitin

| | | | | | | |
|---|---|---|---|---|---|---|
| 4324 | 2054420 | AI660551 | 0.76 | 0.027 | 0.74 | 0.026 |
| 1581 | 3737319 | AF224669 | 0.80 | 0.011 | 0.61 | 0.009 |
| 7772 | 1599036 | AF076269 | 0.65 | 0.020 | 0.69 | 0.031 |
| 7463 | 3137251 | BE250544 | 0.71 | 0.009 | 0.71 | 0.036 |
| 9051 | 2156453 | X04803 | 0.66 | 0.008 | 0.64 | 0.032 |
| 6469 | 2365530 | AI816068 | 0.81 | 0.030 | 0.77 | 0.046 |
| 10565 | 3340760 | NM_014235 | 1.31 | 0.002 | 1.23 | 0.039 |

[0091] TABLE 12

| Gene Probe | Vendor | Accession | Cohort 1 | | Cohort 2 | |
|---|---|---|---|---|---|---|
| ID | Probe ID | Number | Ratio | P value | Ratio | P value |
| 11533 | 2819848 | L22214 | 0.78 | 0.040 | 0.83 | 0.017 |
| 5702 | 3837686 | L12168 | 0.80 | 0.014 | 0.77 | 0.042 |
| 10551 | 1505827 | AB003476 | 0.75 | 0.025 | 0.67 | 0.025 |
| 6131 | 702628 | AF022109 | 1.29 | 0.018 | 1.25 | 0.032 |
| 4823 | 3561540 | S77094 | 0.47 | 0.002 | 0.53 | 0.034 |
| 9282 | 4117578 | NM_001584 | 0.74 | 0.048 | 0.66 | 0.019 |
| 4447 | 1650782 | X70476 | 0.75 | 0.029 | 0.71 | 0.045 |
| 7602 | 1854862 | D17530 | 0.77 | 0.001 | 0.82 | 0.017 |
| 4575 | 1873115 | U50733 | 0.81 | 0.013 | 0.74 | 0.029 |
| 8873 | 4063074 | AJ404468 | 0.70 | 0.009 | 0.68 | 0.014 |
| 10457 | 4244154 | AF035300 | 0.67 | 0.001 | 0.69 | 0.010 |
| 3996 | 2267630 | NM_005544 | 1.23 | 0.046 | 1.22 | 0.043 |
| 382 | 3629462 | AW296221 | 1.26 | 0.022 | 1.33 | 0.025 |
| 7648 | 1649906 | L06237 | 1.22 | 0.015 | 1.37 | 0.004 |
| 7500 | 1754454 | AW960243 | 0.79 | 0.028 | 0.73 | 0.022 |
| 3704 | 4692382 | S41458 | 1.22 | 0.020 | 1.29 | 0.004 |
| 8058 | 1231405 | D14889 | 0.63 | 0.002 | 0.52 | 0.004 |
| 8544 | 926444 | U78164 | 0.81 | 0.033 | 0.69 | 0.035 |
| 8216 | 2287230 | Y07565 | 0.76 | 0.015 | 0.60 | 0.008 |
| 10389 | 1902608 | AK001725 | 0.77 | 0.005 | 0.76 | 0.019 |
| 2635 | 5121313 | U52840 | 0.77 | 0.029 | 0.76 | 0.012 |
| 3950 | 1259691 | AB002372 | 1.36 | 0.003 | 1.43 | 0.013 |
| 6381 | 1890049 | NM_004853 | 0.70 | 0.002 | 0.70 | 0.045 |
| 696 | 5297230 | AF060568 | 1.30 | 0.013 | 1.43 | 0.004 |
| 11609 | 311459 | AF060568 | 1.29 | 0.001 | 1.33 | 0.026 |

[0092] TABLE 13

| | | Microarray, | | Microarray, | | TaqMan Q-PCR | |
|---|---|---|---|---|---|---|---|
| | | Cohort 1 | | Cohort 2 | | Cohorts 1 and 2 | |
| | | Fold | | Fold | | Fold | |
| Accession | Category | change | p value | change | p value | change | p value |
| NM_004046 | Mitochon. | 0.93 | 0.530 | 0.70 | 0.055 | 0.68 | 0.00005 |
| NM_001696 | Mitochon. | 0.67 | 0.001 | 0.70 | 0.035 | 0.79 | 0.00784 |
| NM_004929.2 | Neuronal | 0.69 | 0.103 | 0.51 | 0.004 | 0.55 | 0.00059 |
| NM_001865.2 | Neuronal | 1.00 | 0.962 | 0.70 | 0.071 | 0.68 | 0.00197 |
| NM_002045 | Neuronal | 1.06 | 0.454 | 0.67 | 0.052 | 0.55 | 0.00010 |
| NM_005544.1 | Mitochon. | 1.23 | 0.046 | 1.22 | 0.043 | 0.73 | 0.00232 |
| NM_005566.1 | Mitochon. | 0.65 | 0.004 | 0.66 | 0.040 | 0.76 | 0.00232 |
| NM_002492.1 | Mitochon. | 0.70 | 0.020 | 0.68 | 0.041 | 0.93 | 0.37033 |
| NM_002495.1 | Mitochon. | 0.69 | 0.017 | 0.59 | 0.012 | 0.76 | 0.00035 |
| NM_016446.2 | Neuronal | 0.67 | 10E−7 | 0.74 | 0.043 | 0.72 | 0.00029 |
| NM_148976.1 | Proteasome | 0.72 | 0.019 | 0.53 | 0.005 | 0.65 | 0.00003 |
| NM_002798.1 | Proteasome | 0.73 | 0.002 | 0.58 | 0.009 | 0.75 | 0.00001 |
| NM_002823.2 | Neuronal | 1.44 | 0.005 | 1.55 | 0.008 | 0.99 | 0.88322 |
| NM_004794 | Neuronal | 0.63 | 0.002 | 0.52 | 0.004 | 0.70 | 0.00012 |
| NM_004168.1 | Mitochon. | 0.72 | 0.012 | 0.71 | 0.037 | 0.84 | 0.04256 |
| NM_004853 | Neuronal | 0.70 | 0.002 | 0.70 | 0.045 | 0.92 | 0.13930 |
| NM_018955 | Ubiquitin | 0.66 | 0.008 | 0.64 | 0.032 | 0.64 | 0.00017 |
| NM_003338.3 | Ubiquitin | 0.81 | 0.030 | 0.77 | 0.046 | 0.90 | 0.34074 |

[0093] TABLE 14

| | Reference | | | Cohort 1 | | Cohort 2 | |
|---|---|---|---|---|---|---|---|
| SEQ ID NO: | Number | GeneProbeID | Accession | Ratio | P Value | Ratio | P Value |
| SEQ ID NO: 1 | NM_006670 | 12441 | Z29083 | 1.235 | 0.0310 | 1.285 | 0.0371 |
| SEQ ID NO: 2 | NM_003815 | 11233 | U41767 | 1.224 | 0.0076 | 1.278 | 0.0162 |
| SEQ ID NO: 3 | NM_005100 | 8284 | AB003476 | 0.748 | 0.0246 | 0.673 | 0.0253 |
| SEQ ID NO: 4 | NM_000019. | 8340 | D90228 | 0.772 | 0.0156 | 0.661 | 0.0134 |
| SEQ ID NO: 5 | NM_004300 | 5216 | NM_004300 | 0.810 | 0.0415 | 0.734 | 0.0337 |
| SEQ ID NO: 6 | NM_000674 | 11533 | L22214 | 0.776 | 0.0401 | 0.827 | 0.0166 |
| SEQ ID NO: 7 | NM_016282 | 3371 | AK001553 | 0.714 | 0.0463 | 0.664 | 0.0116 |
| SEQ ID NO: 8 | NM_006367 | 7888 | L12168 | 0.799 | 0.0140 | 0.773 | 0.0418 |
| SEQ ID NO: 9 | NM_005484 | 3454 | AK001980 | 0.758 | 0.0296 | 0.698 | 0.0026 |
| SEQ ID NO: 10 | NM_006066 | 8600 | AW873466 | 0.673 | 0.0040 | 0.723 | 0.0399 |
| SEQ ID NO: 11 | NM_020299. | 11182 | AF032455 | 0.686 | 0.0023 | 0.663 | 0.0408 |
| SEQ ID NO: 12 | NM_014885 | 3712 | AF132794 | 1.338 | 0.0238 | 1.299 | 0.0394 |
| SEQ ID NO: 13 | NM_003801 | 3883 | NM_003801 | 0.741 | 0.0061 | 0.719 | 0.0058 |
| SEQ ID NO: 14 | NM_001139. | 7002 | AF038461 | 1.210 | 0.0340 | 1.208 | 0.0412 |
| SEQ ID NO: 15 | S80343 | 10686 | S80343 | 0.757 | 0.0478 | 0.692 | 0.0327 |
| SEQ ID NO: 16 | NM_001696 | 2365 | X76228 | 0.671 | 0.0010 | 0.703 | 0.0353 |
| SEQ ID NO: 17 | NM_004323 | 3950 | Z35491 | 0.771 | 0.0116 | 0.768 | 0.0486 |
| SEQ ID NO: 18 | NM_001726 | 10551 | AA884041 | 1.363 | 0.0172 | 1.352 | 0.0403 |
| SEQ ID NO: 19 | NM_007371 | 2264 | D26362 | 1.366 | 0.0007 | 1.381 | 0.0337 |
| SEQ ID NO: 20 | NM_001328 | 12415 | NM_001328 | 0.642 | 0.0287 | 0.601 | 0.0307 |
| SEQ ID NO: 21 | NM_018398 | 2616 | AJ272213 | 0.704 | 0.0213 | 0.628 | 0.0097 |
| SEQ ID NO: 22 | NM_016352 | 11963 | AF095719 | 1.247 | 0.0017 | 1.223 | 0.0116 |
| SEQ ID NO: 23 | NM_003652 | 418 | U83411 | 1.255 | 0.0193 | 1.229 | 0.0451 |
| SEQ ID NO: 24 | NM_001334 | 6131 | N20599 | 0.788 | 0.0495 | 0.751 | 0.0287 |
| SEQ ID NO: 25 | NM_005194. | 2597 | X52560 | 1.239 | 0.0178 | 1.210 | 0.0226 |
| SEQ ID NO: 26 | NM_001254. | 751 | AF022109 | 1.285 | 0.0180 | 1.251 | 0.0318 |
| SEQ ID NO: 27 | NM_145054 | 12017 | AAF50630 | 0.632 | 0.0053 | 0.661 | 0.0060 |
| SEQ ID NO: 28 | NM_006430 | 7197 | U38846 | 0.691 | 0.0246 | 0.574 | 0.0439 |
| SEQ ID NO: 29 | NM_000079 | 12634 | S77094 | 0.470 | 0.0017 | 0.529 | 0.0344 |
| SEQ ID NO: 30 | NM_004872 | 10456 | AA305978 | 0.713 | 0.0386 | 0.688 | 0.0360 |
| SEQ ID NO: 31 | NM_001584 | 9282 | NM_001584 | 0.736 | 0.0483 | 0.662 | 0.0187 |
| SEQ ID NO: 32 | NM_005716 | 1988 | AA581812 | 1.225 | 0.0093 | 1.285 | 0.0263 |
| SEQ ID NO: 33 | NM_004891 | 696 | NM_004891 | 0.770 | 0.0073 | 0.686 | 0.0297 |
| SEQ ID NO: 34 | NM_021188 | 11609 | U90919 | 0.563 | 0.0017 | 0.618 | 0.0377 |
| SEQ ID NO: 35 | NM_004766. | 4447 | X70476 | 0.746 | 0.0285 | 0.709 | 0.0452 |
| SEQ ID NO: 36 | NM_033138 | 10323 | D79413 | 1.283 | 0.0126 | 1.323 | 0.0306 |
| SEQ ID NO: 37 | NM_001847. | 2583 | D21337 | 1.348 | 0.0277 | 1.344 | 0.0216 |
| SEQ ID NO: 38 | NM_001849 | 466 | AL360197 | 0.828 | 0.0386 | 0.720 | 0.0258 |
| SEQ ID NO: 39 | NM_016129 | 8649 | AK001148 | 0.623 | 0.0188 | 0.524 | 0.0028 |
| SEQ ID NO: 40 | NM_005190 | 4947 | M74091 | 0.787 | 0.0401 | 0.725 | 0.0178 |
| SEQ ID NO: 41 | NM_004354 | 6386 | AI271688 | 0.754 | 0.0435 | 0.618 | 0.0040 |
| SEQ ID NO: 42 | NM_000397 | 7493 | X04011 | 0.749 | 0.0016 | 0.701 | 0.0303 |
| SEQ ID NO: 43 | NM_001916 | 11729 | AK026633 | 0.723 | 0.0453 | 0.654 | 0.0174 |
| SEQ ID NO: 44 | NM_019010 | 11212 | X73501 | 1.244 | 0.0116 | 1.204 | 0.0366 |
| SEQ ID NO: 45 | AW351829 | 10444 | AW351829 | 1.221 | 0.0368 | 1.317 | 0.0084 |
| SEQ ID NO: 46 | NM_004088 | 970 | NM_004088 | 1.255 | 0.0264 | 1.281 | 0.0242 |
| SEQ ID NO: 47 | NM_000398 | 2503 | M16462 | 0.801 | 0.0140 | 0.800 | 0.0399 |
| SEQ ID NO: 48 | NM_012135 | 6101 | Y18504 | 0.624 | 0.0083 | 0.586 | 0.0094 |
| SEQ ID NO: 49 | NM_004395 | 7602 | D17530 | 0.769 | 0.0006 | 0.816 | 0.0170 |
| SEQ ID NO: 50 | NM_006400 | 11630 | U50733 | 0.810 | 0.0132 | 0.737 | 0.0290 |
| SEQ ID NO: 51 | NM_004662 | 8873 | AJ404468 | 0.703 | 0.0088 | 0.678 | 0.0140 |
| SEQ ID NO: 52 | L19267. | 1997 | L19267 | 1.247 | 0.0479 | 1.343 | 0.0259 |
| SEQ ID NO: 53 | NM_000109 | 2160 | AA661835 | 0.744 | 0.0215 | 0.656 | 0.0475 |
| SEQ ID NO: 54 | NM_007040. | 12542 | AJ007509 | 1.210 | 0.0002 | 1.217 | 0.0347 |
| SEQ ID NO: 55 | NM_006816. | 11384 | BE254013 | 0.828 | 0.0067 | 0.710 | 0.0170 |
| SEQ ID NO: 56 | NM_001984 | 9805 | AF112219 | 0.624 | 0.0235 | 0.743 | 0.0369 |
| SEQ ID NO: 57 | NM_182647 | 8474 | AA827495 | 0.728 | 0.0070 | 0.752 | 0.0222 |
| SEQ ID NO: 58 | NM_014239 | 2796 | AF035280 | 0.772 | 0.0071 | 0.672 | 0.0084 |
| SEQ ID NO: 59 | NM_003753 | 8558 | AW249334 | 0.815 | 0.0175 | 0.719 | 0.0276 |
| SEQ ID NO: 60 | NM_005236. | 11439 | L77890 | 1.245 | 0.0267 | 1.326 | 0.0357 |
| SEQ ID NO: 61 | NM_002027. | 7902 | L10413 | 0.785 | 0.0345 | 0.804 | 0.0379 |
| SEQ ID NO: 62 | NM_006329 | 1644 | AF112152 | 0.623 | 0.0002 | 0.687 | 0.0142 |
| SEQ ID NO: 63 | NM_004116 | 14 | D38037 | 0.618 | 0.0055 | 0.700 | 0.0048 |
| SEQ ID NO: 64 | NM_004111 | 3887 | BE278623 | 0.758 | 0.0337 | 0.713 | 0.0267 |
| SEQ ID NO: 65 | NM_004816 | 12538 | L27479 | 1.207 | 0.0125 | 1.316 | 0.0043 |
| SEQ ID NO: 66 | NM_004477 | 5447 | AA905219 | 0.789 | 0.0200 | 0.686 | 0.0217 |
| SEQ ID NO: 67 | NM_002092 | 8310 | U07231 | 0.741 | 0.0158 | 0.652 | 0.0340 |
| SEQ ID NO: 68 | NM_002051 | 502 | X58072 | 1.284 | 0.0138 | 1.278 | 0.0237 |
| SEQ ID NO: 69 | NM_014628 | 5102 | NM_014628 | 0.717 | 0.0091 | 0.641 | 0.0233 |
| SEQ ID NO: 70 | NM_004483 | 2372 | D00723 | 0.680 | 0.0139 | 0.691 | 0.0111 |
| SEQ ID NO: 71 | NM_004487. | 8490 | NM_004487 | 0.707 | 0.0236 | 0.657 | 0.0171 |
| SEQ ID NO: 72 | NM_006597 | 11631 | AW249010 | 0.547 | 0.0054 | 0.639 | 0.0336 |
| SEQ ID NO: 73 | NM_004506 | 3143 | NM_004506 | 0.814 | 0.0365 | 0.776 | 0.0306 |
| SEQ ID NO: 74 | NM_177433 | 4554 | U92544 | 0.748 | 0.0144 | 0.753 | 0.0314 |
| SEQ ID NO: 75 | NM_000566 | 11986 | AAD34932 | 1.249 | 0.0288 | 1.286 | 0.0420 |
| SEQ ID NO: 76 | NM_002128 | 10485 | BE266776 | 1.218 | 0.0117 | 1.270 | 0.0225 |
| SEQ ID NO: 77 | NM_005800 | 9330 | X59131 | 0.763 | 0.0278 | 0.543 | 0.0104 |
| SEQ ID NO: 78 | NM_005340 | 2481 | AK026557 | 0.627 | 0.0043 | 0.660 | 0.0410 |
| SEQ ID NO: 79 | NM_007067 | 11199 | AF140360 | 0.767 | 0.0168 | 0.719 | 0.0259 |
| SEQ ID NO: 80 | NM_015980. | 177 | AF113537 | 0.531 | 0.0043 | 0.537 | 0.0410 |
| SEQ ID NO: 81 | NM_024293 | 9735 | AK026155 | 0.751 | 0.0090 | 0.575 | 0.0129 |
| SEQ ID NO: 82 | NM_023924 | 5643 | AK026830 | 0.828 | 0.0196 | 0.784 | 0.0040 |
| SEQ ID NO: 83 | NM_024639 | 12096 | AK027046 | 1.227 | 0.0231 | 1.217 | 0.0422 |
| SEQ ID NO: 84 | AF070536 | 2983 | AF070536 | 1.277 | 0.0212 | 1.359 | 0.0135 |
| SEQ ID NO: 85 | NM_014685 | 4324 | AI660551 | 0.757 | 0.0269 | 0.736 | 0.0258 |
| SEQ ID NO: 86 | NM_006003. | 6058 | L32977 | 0.660 | 0.0076 | 0.636 | 0.0256 |
| SEQ ID NO: 87 | NM_001628. | 11907 | M59783 | 0.687 | 0.0065 | 0.617 | 0.0214 |
| SEQ ID NO: 88 | NM_002038 | 1248 | AK024814 | 0.687 | 0.0491 | 0.776 | 0.0156 |
| SEQ ID NO: 89 | NM_001914 | 3862 | AK026310 | 0.781 | 0.0314 | 0.718 | 0.0432 |
| SEQ ID NO: 90 | NM_003105 | 4354 | U90916 | 1.598 | 0.0442 | 1.904 | 0.0460 |
| SEQ ID NO: 91 | AF282498 | 11926 | AF282498 | 0.647 | 0.0087 | 0.671 | 0.0180 |
| SEQ ID NO: 92 | AF143872 | 10107 | AF143872 | 1.287 | 0.0212 | 1.209 | 0.0142 |
| SEQ ID NO: 93 | NM_017528 | 6579 | AF218007 | 0.821 | 0.0494 | 0.658 | 0.0060 |
| SEQ ID NO: 94 | Z58229 | 2397 | Z58229 | 0.765 | 0.0481 | 0.656 | 0.0138 |
| SEQ ID NO: 95 | NM_004980. | 8341 | AL049557 | 0.785 | 0.0324 | 0.749 | 0.0085 |
| SEQ ID NO: 96 | NM_000175 | 3459 | X83464 | 0.774 | 0.0020 | 0.757 | 0.0386 |
| SEQ ID NO: 97 | AP000500 | 11099 | AP000500 | 1.383 | 0.0222 | 1.339 | 0.0174 |
| SEQ ID NO: 98 | NM_006430. | 6950 | D17080 | 0.714 | 0.0179 | 0.522 | 0.0201 |
| SEQ ID NO: 99 | NM_000786. | 382 | U51684 | 1.314 | 0.0161 | 1.301 | 0.0156 |
| SEQ ID NO: 100 | NM_001780. | 7703 | M58485 | 0.778 | 0.0157 | 0.688 | 0.0291 |
| SEQ ID NO: 101 | NM_003340 | 1581 | AF224669 | 0.805 | 0.0108 | 0.611 | 0.0089 |
| SEQ ID NO: 102 | NM_012212 | 5536 | D49387 | 0.703 | 0.0461 | 0.564 | 0.0040 |
| SEQ ID NO: 103 | NM_003319 | 6868 | X90569 | 1.304 | 0.0110 | 1.542 | 0.0052 |
| SEQ ID NO: 104 | NM_001677. | 4755 | M25161 | 1.232 | 0.0284 | 1.205 | 0.0381 |
| SEQ ID NO: 105 | NM_004820 | 9177 | AF127089 | 1.224 | 0.0082 | 1.271 | 0.0153 |
| SEQ ID NO: 106 | XM_370630 | 1578 | X91192 | 0.794 | 0.0142 | 0.770 | 0.0424 |
| SEQ ID NO: 107 | NM_002823 | 1590 | M67480 | 1.444 | 0.0046 | 1.545 | 0.0082 |
| SEQ ID NO: 108 | NM_005105. | 6697 | AF231512 | 0.745 | 0.0262 | 0.725 | 0.0097 |
| SEQ ID NO: 109 | U72852 | 11096 | U72852 | 1.293 | 0.0230 | 1.254 | 0.0363 |
| SEQ ID NO: 110 | NM_004181 | 7772 | AF076269 | 0.653 | 0.0201 | 0.694 | 0.0311 |
| SEQ ID NO: 111 | NM_018320. | 5992 | AK023139 | 0.796 | 0.0234 | 0.710 | 0.0028 |
| SEQ ID NO: 112 | AK000644 | 1656 | AK000644 | 0.777 | 0.0070 | 0.768 | 0.0165 |
| SEQ ID NO: 113 | NM_022752 | 12046 | AK025712 | 0.707 | 0.0321 | 0.725 | 0.0182 |
| SEQ ID NO: 114 | NM_022720 | 3953 | AK025539 | 1.274 | 0.0094 | 1.218 | 0.0329 |
| SEQ ID NO: 115 | NM_021248 | 10457 | AF035300 | 0.670 | 0.0006 | 0.691 | 0.0097 |
| SEQ ID NO: 116 | NM_005785 | 5222 | NM_005785 | 0.823 | 0.0495 | 0.810 | 0.0349 |
| SEQ ID NO: 117 | NM_001545. | 4332 | X81788 | 0.782 | 0.0119 | 0.730 | 0.0356 |
| SEQ ID NO: 118 | NM_001551 | 4023 | Y08915 | 0.820 | 0.0241 | 0.733 | 0.0415 |
| SEQ ID NO: 119 | M87790 | 8442 | M87790 | 0.761 | 0.0086 | 0.715 | 0.0238 |
| SEQ ID NO: 120 | NM_002221 | 167 | X57206 | 1.226 | 0.0239 | 1.241 | 0.0422 |
| SEQ ID NO: 121 | NM_001567. | 5873 | Y14385 | 0.797 | 0.0496 | 0.800 | 0.0172 |
| SEQ ID NO: 122 | NM_005544 | 12292 | NM_005544 | 1.228 | 0.0459 | 1.215 | 0.0426 |
| SEQ ID NO: 123 | NM_002178. | 6156 | M62402 | 0.616 | 0.0011 | 0.826 | 0.0156 |
| SEQ ID NO: 124 | NM_181469. | 8401 | BE294405 | 0.732 | 0.0067 | 0.687 | 0.0030 |
| SEQ ID NO: 125 | NM_004515 | 674 | AA307289 | 0.771 | 0.0166 | 0.710 | 0.0200 |
| SEQ ID NO: 126 | NM_005530. | 3986 | U07681 | 0.717 | 0.0078 | 0.759 | 0.0357 |
| SEQ ID NO: 127 | NM_075891 | 11356 | AAC70890 | 1.259 | 0.0108 | 1.326 | 0.0127 |
| SEQ ID NO: 128 | NM_014762. | 901 | 013643 | 0.714 | 0.0057 | 0.684 | 0.0199 |
| SEQ ID NO: 129 | NM_015359. | 5285 | D31887 | 0.771 | 0.0088 | 0.695 | 0.0084 |
| SEQ ID NO: 130 | NM_014752 | 10531 | AL047241 | 0.775 | 0.0344 | 0.678 | 0.0216 |
| SEQ ID NO: 131 | XM_291253 | 8481 | D63480 | 0.786 | 0.0289 | 0.654 | 0.0212 |
| SEQ ID NO: 132 | NM_015286. | 7244 | AB002351 | 0.816 | 0.0469 | 0.763 | 0.0218 |
| SEQ ID NO: 133 | NM_014954 | 1539 | AB023202 | 0.762 | 0.0202 | 0.755 | 0.0435 |
| SEQ ID NO: 134 | NM_020868. | 6790 | AB040925 | 0.676 | 0.0120 | 0.756 | 0.0350 |
| SEQ ID NO: 135 | NM_020882 | 11332 | AB040943 | 1.255 | 0.0072 | 1.298 | 0.0008 |
| SEQ ID NO: 136 | NM_003937 | 12458 | AW296221 | 1.264 | 0.0217 | 1.331 | 0.0253 |
| SEQ ID NO: 137 | NM_005566 | 3715 | AK026515 | 0.647 | 0.0042 | 0.659 | 0.0397 |
| SEQ ID NO: 138 | NM_015907 | 9204 | AF061738 | 0.731 | 0.0431 | 0.698 | 0.0165 |
| SEQ ID NO: 139 | NM_002347 | 10406 | NM_002347 | 1.260 | 0.0185 | 1.323 | 0.0105 |
| SEQ ID NO: 140 | NM_016457 | 7648 | M60458 | 0.554 | 0.0310 | 0.760 | 0.0473 |
| SEQ ID NO: 141 | NM_013446 | 2744 | AF117233 | 0.722 | 0.0054 | 0.664 | 0.0244 |
| SEQ ID NO: 142 | NM_005918 | 1922 | AW249275 | 0.623 | 0.0020 | 0.582 | 0.0110 |
| SEQ ID NO: 143 | NM_006699 | 5702 | AF027156 | 0.674 | 0.0076 | 0.767 | 0.0356 |
| SEQ ID NO: 144 | NM_005909. | 7296 | L06237 | 1.215 | 0.0154 | 1.368 | 0.0035 |
| SEQ ID NO: 145 | NM_004526 | 4204 | BE250461 | 0.728 | 0.0044 | 0.765 | 0.0230 |
| SEQ ID NO: 146 | NM_002439 | 9544 | NM_002439 | 1.384 | 0.0002 | 1.228 | 0.0306 |
| SEQ ID NO: 147 | NM_004529. | 4326 | AI110630 | 1.348 | 0.0020 | 1.413 | 0.0487 |
| SEQ ID NO: 148 | NM_021019 | 5171 | M22918 | 0.724 | 0.0016 | 0.627 | 0.0059 |
| SEQ ID NO: 149 | NM_018946 | 2814 | AK001659 | 0.772 | 0.0291 | 0.626 | 0.0164 |
| SEQ ID NO: 150 | NM_177924 | 4286 | AA220921 | 0.700 | 0.0360 | 0.624 | 0.0280 |
| SEQ ID NO: 151 | NM_004546 | 6731 | AF067166 | 0.742 | 0.0049 | 0.714 | 0.0430 |
| SEQ ID NO: 152 | NM_002492. | 9906 | AF047181 | 0.698 | 0.0199 | 0.683 | 0.0414 |
| SEQ ID NO: 153 | NM_002495. | 1541 | AF020351 | 0.689 | 0.0175 | 0.587 | 0.0119 |
| SEQ ID NO: 154 | NM_016446. | 6245 | NM_016446 | 0.674 | 0.0000 | 0.743 | 0.0430 |
| SEQ ID NO: 155 | NM_006156 | 7500 | AW960243 | 0.790 | 0.0284 | 0.733 | 0.0223 |
| SEQ ID NO: 156 | NM_005863. | 558 | AW237438 | 0.776 | 0.0167 | 0.784 | 0.0229 |
| SEQ ID NO: 157 | NM_020202 | 10154 | AF284574 | 0.754 | 0.0076 | 0.741 | 0.0219 |
| SEQ ID NO: 158 | NM_005489. | 5610 | AF124251 | 0.708 | 0.0335 | 0.774 | 0.0251 |
| SEQ ID NO: 159 | NM_002552. | 8337 | NM_002552 | 0.763 | 0.0293 | 0.464 | 0.0216 |
| SEQ ID NO: 160 | NM_002553. | 422 | U92538 | 0.820 | 0.0106 | 0.773 | 0.0151 |
| SEQ ID NO: 161 | NM_006194 | 5939 | U59628 | 1.442 | 0.0295 | 1.365 | 0.0398 |
| SEQ ID NO: 162 | NM_015946 | 5996 | AK025729 | 0.700 | 0.0042 | 0.632 | 0.0043 |
| SEQ ID NO: 163 | NM_000285 | 1194 | J04605 | 0.727 | 0.0367 | 0.598 | 0.0174 |
| SEQ ID NO: 164 | NM_004461 | 2385 | U07424 | 0.751 | 0.0278 | 0.773 | 0.0029 |
| SEQ ID NO: 165 | NM_000283. | 880 | S41458 | 1.219 | 0.0202 | 1.292 | 0.0038 |
| SEQ ID NO: 166 | NM_002631 | 7125 | U30255 | 0.752 | 0.0144 | 0.722 | 0.0066 |
| SEQ ID NO: 167 | NM_002629. | 7898 | J04173 | 0.596 | 0.0036 | 0.640 | 0.0396 |
| SEQ ID NO: 168 | NM_002767 | 9442 | NM_002767 | 0.795 | 0.0326 | 0.609 | 0.0061 |
| SEQ ID NO: 169 | NM_000293. | 1930 | X84908 | 0.738 | 0.0167 | 0.655 | 0.0068 |
| SEQ ID NO: 170 | NM_005837. | 7295 | BE206450 | 0.744 | 0.0107 | 0.636 | 0.0035 |
| SEQ ID NO: 171 | NM_020122. | 11779 | AF155652 | 0.748 | 0.0292 | 0.661 | 0.0199 |
| SEQ ID NO: 172 | NM_002245. | 6586 | U33632 | 0.725 | 0.0479 | 0.684 | 0.0259 |
| SEQ ID NO: 173 | NM_021161 | 11111 | AF279890 | 0.762 | 0.0239 | 0.790 | 0.0225 |
| SEQ ID NO: 174 | NM_000220. | 12116 | U65406 | 1.256 | 0.0314 | 1.297 | 0.0387 |
| SEQ ID NO: 175 | NM_014888. | 2093 | AI491952 | 0.652 | 0.0159 | 0.563 | 0.0204 |
| SEQ ID NO: 176 | NM_002726 | 1263 | X74496 | 0.690 | 0.0282 | 0.700 | 0.0154 |
| SEQ ID NO: 177 | NM_000282 | 277 | S79219 | 0.770 | 0.0295 | 0.699 | 0.0089 |
| SEQ ID NO: 178 | NM_002806 | 10492 | AF006305 | 0.776 | 0.0269 | 0.629 | 0.0404 |
| SEQ ID NO: 179 | NM_002812. | 1045 | BE271628 | 0.755 | 0.0280 | 0.645 | 0.0355 |
| SEQ ID NO: 180 | NM_063010. | 3002 | AB003177 | 0.737 | 0.0026 | 0.716 | 0.0105 |
| SEQ ID NO: 181 | NM_176783 | 9466 | AA310524 | 0.688 | 0.0209 | 0.741 | 0.0048 |
| SEQ ID NO: 182 | NM_002786 | 5380 | AI889267 | 0.721 | 0.0186 | 0.534 | 0.0046 |
| SEQ ID NO: 183 | NM_002798 | 1497 | D29012 | 0.684 | 0.0088 | 0.606 | 0.0230 |
| SEQ ID NO: 184 | NM_014297. | 3996 | NM_014297 | 0.789 | 0.0184 | 0.782 | 0.0119 |
| SEQ ID NO: 185 | NM_006741. | 1273 | U48707 | 0.746 | 0.0417 | 0.711 | 0.0031 |
| SEQ ID NO: 186 | NM_005389. | 1912 | D13892 | 0.633 | 0.0049 | 0.730 | 0.0064 |
| SEQ ID NO: 187 | NM_016145 | 7319 | AW405217 | 0.833 | 0.0053 | 0.826 | 0.0285 |
| SEQ ID NO: 188 | NM_019852 | 6356 | AW959460 | 0.781 | 0.0360 | 0.574 | 0.0039 |
| SEQ ID NO: 189 | NM_005801 | 12691 | AF083441 | 1.238 | 0.0418 | 1.250 | 0.0295 |
| SEQ ID NO: 190 | NM_000925. | 8538 | NM_000925 | 0.757 | 0.0424 | 0.640 | 0.0482 |
| SEQ ID NO: 191 | NM_021252. | 3704 | AK001555 | 1.274 | 0.0307 | 1.446 | 0.0292 |
| SEQ ID NO: 192 | NM_004794 | 8058 | D14889 | 0.632 | 0.0017 | 0.524 | 0.0040 |
| SEQ ID NO: 193 | NM_002873. | 4823 | AF098534 | 0.754 | 0.0209 | 0.667 | 0.0354 |
| SEQ ID NO: 194 | NM_006265. | 3024 | NM_006265 | 0.826 | 0.0354 | 0.774 | 0.0424 |
| SEQ ID NO: 195 | NM_000448. | 9956 | M29474 | 1.241 | 0.0173 | 1.275 | 0.0192 |
| SEQ ID NO: 196 | NM_005056 | 4307 | NM_005056 | 1.355 | 0.0096 | 1.519 | 0.0128 |
| SEQ ID NO: 197 | NM_002939 | 549 | X13973 | 0.818 | 0.0260 | 0.832 | 0.0481 |
| SEQ ID NO: 198 | NM_002930 | 8216 | Y07565 | 0.760 | 0.0147 | 0.605 | 0.0078 |
| SEQ ID NO: 199 | NM_001754 | 9415 | AW963298 | 1.299 | 0.0197 | 1.260 | 0.0074 |
| SEQ ID NO: 200 | NM_080564 | 10389 | AK001725 | 0.773 | 0.0045 | 0.757 | 0.0192 |
| SEQ ID NO: 201 | NM_004589 | 10357 | AI332708 | 0.646 | 0.0118 | 0.696 | 0.0433 |
| SEQ ID NO: 202 | NM_003966 | 2635 | U52840 | 0.771 | 0.0288 | 0.765 | 0.0117 |
| SEQ ID NO: 203 | AX014302 | 8148 | AX014302 | 1.214 | 0.0488 | 1.233 | 0.0287 |
| SEQ ID NO: 204 | AX015317 | 378 | AX015317 | 1.341 | 0.0110 | 1.309 | 0.0398 |
| SEQ ID NO: 205 | AX018011 | 95 | AX018011 | 0.819 | 0.0428 | 0.731 | 0.0294 |
| SEQ ID NO: 206 | AX017279 | 11018 | AX017279 | 1.249 | 0.0327 | 1.326 | 0.0132 |
| SEQ ID NO: 207 | AX014335 | 6676 | AX014335 | 0.812 | 0.0233 | 0.746 | 0.0014 |
| SEQ ID NO: 208 | AX015383 | 4575 | AX015383 | 0.665 | 0.0004 | 0.694 | 0.0117 |
| SEQ ID NO: 209 | AX017516 | 6044 | AX017516 | 0.803 | 0.0461 | 0.681 | 0.0186 |
| SEQ ID NO: 210 | AX014881 | 3744 | AX014881 | 0.710 | 0.0135 | 0.788 | 0.0212 |
| SEQ ID NO: 211 | AX017258 | 2371 | AX017258 | 0.649 | 0.0086 | 0.734 | 0.0360 |
| SEQ ID NO: 212 | AX011691 | 5507 | AX011691 | 0.804 | 0.0046 | 0.787 | 0.0176 |
| SEQ ID NO: 213 | AX015417 | 597 | AX015417 | 0.750 | 0.0069 | 0.638 | 0.0068 |
| SEQ ID NO: 214 | NM_032635 | 11303 | AW473288 | 0.749 | 0.0037 | 0.794 | 0.0463 |
| SEQ ID NO: 215 | NM_014281 | 7929 | AF114818 | 0.799 | 0.0263 | 0.721 | 0.0112 |
| SEQ ID NO: 216 | NM_020320 | 4468 | AK023550 | 0.678 | 0.0060 | 0.699 | 0.0122 |
| SEQ ID NO: 217 | NM_007069 | 10562 | AI375733 | 0.772 | 0.0069 | 0.768 | 0.0476 |
| SEQ ID NO: 218 | NM_005210 | 506 | AAD15549 | 1.318 | 0.0246 | 1.503 | 0.0160 |
| SEQ ID NO: 219 | NM_032964 | 933 | NM_004166 | 0.804 | 0.0113 | 0.736 | 0.0147 |
| SEQ ID NO: 220 | NM_003083 | 10496 | AI453282 | 0.739 | 0.0347 | 0.785 | 0.0353 |
| SEQ ID NO: 221 | NM_006936 | 7501 | AA160893 | 0.741 | 0.0170 | 0.648 | 0.0053 |
| SEQ ID NO: 222 | NM_001152 | 1568 | J02683 | 0.666 | 0.0102 | 0.625 | 0.0291 |
| SEQ ID NO: 223 | NM_004168 | 7837 | L21936 | 0.719 | 0.0119 | 0.707 | 0.0373 |
| SEQ ID NO: 224 | NM_003172 | 5291 | Z35093 | 0.826 | 0.0230 | 0.803 | 0.0255 |
| SEQ ID NO: 225 | NM_014723 | 7360 | AB002372 | 1.360 | 0.0035 | 1.427 | 0.0130 |
| SEQ ID NO: 226 | NM_004853 | 6381 | NM_004853 | 0.704 | 0.0019 | 0.700 | 0.0449 |
| SEQ ID NO: 227 | NM_030752 | 3611 | X52882 | 0.702 | 0.0202 | 0.645 | 0.0444 |
| SEQ ID NO: 228 | NM_006520 | 3139 | NM_006520 | 0.763 | 0.0188 | 0.667 | 0.0293 |
| SEQ ID NO: 229 | NM_007375 | 11757 | AL050265 | 0.680 | 0.0282 | 0.701 | 0.0418 |
| SEQ ID NO: 230 | NM_003187 | 5267 | U21858 | 0.733 | 0.0110 | 0.676 | 0.0162 |
| SEQ ID NO: 231 | NM_006930 | 11621 | BE386888 | 0.655 | 0.0068 | 0.657 | 0.0318 |
| SEQ ID NO: 232 | NM_000545 | 3576 | M57732 | 0.798 | 0.0327 | 0.812 | 0.0179 |
| SEQ ID NO: 233 | NM_006335 | 2191 | AW247564 | 0.695 | 0.0236 | 0.578 | 0.0193 |
| SEQ ID NO: 234 | NM_000365. | 5930 | M10036 | 0.674 | 0.0178 | 0.689 | 0.0274 |
| SEQ ID NO: 235 | NM_012410 | 11722 | AJ245820 | 0.656 | 0.0050 | 0.701 | 0.0083 |
| SEQ ID NO: 236 | NM_003332 | 1619 | AF019562 | 1.262 | 0.0410 | 1.341 | 0.0165 |
| SEQ ID NO: 237 | NM_003985. | 675 | AF097738 | 1.277 | 0.0347 | 1.359 | 0.0211 |
| SEQ ID NO: 238 | NM_018955 | 7463 | BE250544 | 0.715 | 0.0090 | 0.709 | 0.0361 |
| SEQ ID NO: 239 | NM_003338 | 6469 | AI816068 | 0.813 | 0.0300 | 0.766 | 0.0463 |
| SEQ ID NO: 240 | NM_014235 | 10565 | NM_014235 | 1.310 | 0.0020 | 1.232 | 0.0387 |
| SEQ ID NO: 241 | NM_005360 | 11168 | AF055376 | 0.696 | 0.0240 | 0.670 | 0.0132 |
| SEQ ID NO: 242 | NM_003374 | 4958 | L06132 | 0.729 | 0.0218 | 0.627 | 0.0323 |
| SEQ ID NO: 243 | NM_003375 | 9571 | AI015604 | 0.714 | 0.0311 | 0.612 | 0.0382 |
| SEQ ID NO: 244 | NM_001079 | 4890 | L05148 | 1.497 | 0.0023 | 1.428 | 0.0239 |
| SEQ ID NO: 245 | NM_003430 | 11943 | AAA59469 | 1.261 | 0.0458 | 1.296 | 0.0410 |
| SEQ ID NO: 246 | NM_006006 | 3717 | AF060568 | 1.300 | 0.0133 | 1.434 | 0.0039 |
| SEQ ID NO: 247 | NM_003457 | 4911 | AF046001 | 0.778 | 0.0243 | 0.675 | 0.0151 |
| SEQ ID NO: 248 | NM_005674 | 6574 | X82125 | 0.768 | 0.0262 | 0.761 | 0.0015 |
| SEQ ID NO: 249 | NM_005857 | 881 | AW192807 | 0.826 | 0.0346 | 0.657 | 0.0153 |

### REFERENCES CITED

[0094] Numerous references are cited and discussed in the description of this invention. The citation and/or discussion of such references is provided merely to clarify the description of the present invention and is not an admission that any such reference is “prior art” to the invention described herein. All references cited and discussed in this specification are incorporated herein by reference in the entirety and to the same extent as if each reference was individually incorporated by reference.
[0095] Tamminga C A, Thaker G K, Buchanan R, Kirkpatrick B, Alphs L D, Chase T N, Carpenter W T. Limbic system abnormalities identified in schizophrenia using positron emission tomography with fluorodeoxyglucose and neocortical alterations with deficit syndrome. Arch Gen Psychiatry. 1992 July; 49(7):522-30.
[0096] Benes F M, Berretta S. GABAergic intemeurons: implications for understanding schizophrenia and bipolar disorder. Neuropsychopharmacology. 2001 July; 25(1):1-27.
[0097] Hemby S E, Ginsberg S D, Brunk B, Arnold S E, Trojanowski J Q, Eberwine J H. Gene expression profile for schizophrenia: discrete neuron transcription patterns in the entorhinal cortex. Arch Gen Psychiatry. 2002 July; 59(7):631-40.
[0098] Arnold S E, Trojanowski J Q. (1996) Recent advances in defining the neuropathology of schizophrenia. Acta Neuropathol (Berl) 92:217-31
[0099] Byne W, Buchsbaum M S, Mattiace L A, Hazlett E A, Kemether E, Elhakem S, Purohit D, Haroutunian V, Jones L (2002) Postmortem assessment of thalamic nuclear volumes in subjects with schizophrenia. Am J Psychiatry 159:59-65.
[0100] Harrison P J. (1999) The neuropathology of schizophrenia. A critical review of the data and their interpretation. Brain 122 (Pt 4):593-624
[0101] Beasley C L, Zhang Z J, Patten I and Reynolds G P (2002) Selective deficits in prefrontal cortical GABAergic neurons in schizophrenia defined by the presence of calcium-binding proteins. Biol. Psychiatry 52:708-15.
[0102] Benes F M. Emerging principles of altered neural circuitry in schizophrenia. Brain Res Brain Res Rev. 2000 March;31(2-3):251-69.
[0103] Dickey C C, McCarley R W, Shenton M E. (2002) The brain in schizotypal personality disorder: a review of structural MRI and CT findings. Harv Rev Psychiatry 10:1-15.
[0104] McCarley R W, Wible C G, Frumin M, Hirayasu Y, Levitt J J, Fischer I A, Shenton M E. (1999) MRI anatomy of schizophrenia. Biol Psychiatry 45:1099-119
[0105] Kishimoto H, Yamada K, Iseki E, Kosaka K, Okoshi T. (1998) Brain imaging of affective disorders and schizophrenia. Psychiatry Clin Neurosci 52 Suppl:S212-4
[0106] Benes F M. Alterations of neural circuitry within layer II of anterior cingulate cortex in schizophrenia. J Psychiatr Res. 1999 November-December; 33(6):511-2.
[0107] Benes F M, Berretta S. Amygdalo-entorhinal inputs to the hippocampal formation in relation to schizophrenia. Ann N Y Acad Sci. 2000 June; 911:293-304.
[0108] Luo L, Salunga R C, Guo H, Bittner A, Joy K C, Galindo J E, Xiao H, Rogers K E, Wan J S, Jackson M R, Erlander M G (1999) Gene expression profiles of laser-captured adjacent neuronal subtypes. Nat Med 5:117-22.
[0109] Eberwine J (1996) Amplication of mRNA populations using aRNA generated from immobilized oligo(dT)-T7 primsed cDNA. Biotechniques 20:584-91
[0110] Van Gelder R N, von Zastrow M E, Yool A, Dement W C, Barchas J D, Eberwine J H.
[0111] Amplified RNA synthesized from limited quantities of heterogeneous cDNA. Proc Natl Acad Sci USA. 1990 March; 87(5):1663-7.
[0112] Mimics K, Middleton F A, Stanwood G D, Lewis D A, Levitt P. Disease-specific changes in regulator of G-protein signaling 4 (RGS4) expression in schizophrenia. Mol Psychiatry. 2001 May; 6(3):293-301.
[0113] Middleton F A, Mirnics K, Pierri J N, Lewis D A and Levitt P (2002) Gene expression profiling reveals alterations of specific metabolic pathways in schizophrenia J. Neuroscience 22:2718-29.
[0114] Hakak Y, Walker J R, Li C, Wong W H, Davis K L, Buxbaum J D, Haroutunian V, Fienberg A A. Genome-wide expression analysis reveals dysregulation of myelination-related genes in chronic schizophrenia. Proc Natl Acad Sci USA. 2001 April 10; 98(8):4746-51.
[0115] Mimics K, Middleton F A, Marquez A, Lewis D A, Levitt P. Molecular characterization of schizophrenia viewed by microarray analysis of gene expression in prefrontal cortex. Neuron. 2000 October; 28(1):53-67
[0116] Mimmack, J. L. et al. Gene expression analysis in schizophrenia: reprotricuble up-regulation of several members of the apolipiprotein L family located in a high-susceptibility locus for schizophrenia on chromosome 22. Proc. Natl. Acad. Sci. 2002 USA 99: 4680-4685.
[0117] Sun Y, Zhang L, Johnston N L, Torrey E F, Yolken R H. Serial analysis of gene expression in the frontal cortex of patients with bipolar disorder. Br J Psychiatry Suppl. 2001 June; 41:s137-41.
[0118] Ohnuma T, Tessler S, Arai H, Faull R L, McKenna P J, Emson P C. Gene expression of metabotropic glutamate receptor 5 and excitatory amino acid transporter 2 in the schizophrenic hippocampus. Brain Res Mol Brain Res. 2000 December 28; 85(1-2):24-31.
[0119] Sokolov B P, Tcherepanov A A, Haroutunian V, Davis K L. Levels of mRNAs encoding synaptic vesicle and synaptic plasma membrane proteins in the temporal cortex of elderly schizophrenic patients. Biol Psychiatry. 2000 August 1; 48(3):184-96.
[0120] Leonard S, Breese C, Adams C, Benhammou K, Gault J, Stevens K, Lee M, Adler L, Olincy A, Ross R, Freedman R. Smoking and schizophrenia: abnormal nicotinic receptor expression. Eur J Pharmacol. 2000 March 30; 393(1-3):237-42.
[0121] Richardson-Burns S M, Haroutunian V, Davis K L, Watson S J, Meador-Woodruff J H. Metabotropic glutamate receptor mRNA expression in the schizophrenic thalamus. Biol Psychiatry. 2000 January 1; 47(1):22-8.
[0122] Karson C N, Mrak R E, Schluterman K O, Stumer W Q, Sheng J G, Griffin W S. Alterations in synaptic proteins and their encoding mRNAs in prefrontal cortex in schizophrenia: a possible neurochemical basis for ‘hypofrontality’. Mol Psychiatry. 1999 January; 4(1):39-45.
[0123] Barbeau D, Liang J J, Robitalille Y, Quirion R, Srivastava L K. Decreased expression of the embryonic form of the neural cell adhesion molecule in schizophrenic brains. Proc Natl Acad Sci USA. 1995 March 28; 92(7):2785-9.
[0124] Meador-Woodruff J H, Grandy D K, Van Tol H H, Damask S P, Little K Y, Civelli O, Watson S J Jr. Dopamine receptor gene expression in the human medial temporal lobe. Neuropsychopharmacology. 1994 July; 10(4):239-48.
[0125] Schmauss C, Haroutunian V, Davis K L, Davidson M. Selective loss of dopamine D3-type receptor mRNA expression in parietal and motor cortices of patients with chronic schizophrenia. Proc Natl Acad Sci U S A. 1993 October 1; 90(19):8942-6.
[0126] Perrett C W, Whatley S A, Ferrier I N, Marchbanks R M. Changes in relative levels of specific brain mRNA species associated with schizophrenia and depression. Brain Res Mol Brain Res. 1992 January; 12(1-3):163-71.
[0127] Mengod G, Vivanco M M, Christnacher A, Probst A, Palacios J M. Study of pro-opiomelanocortin mRNA expression in human postmortem pituitaries. Brain Res Mol Brain Res. 1991 May; 10(2):129-37.
[0128] Perlstein W M, Dixit N K, Carter C S, Noll D C, Cohen J D: Prefrontal cortex dysfunction mediates deficits in working memory and prepotent responding in schizophrenia. Biol Psychiatry 2003; 53(1):25-38
[0129] Benes F M, Berreta S: Amygdalo-entorhinal inputs to the hippocampal formation in relation to schizophrenia. 2000
[0130] Jessen F, Scheef L, Germeshausen L, Tawo Y, Kockler M, Kuhn K U, Maier W, Schild H H, Heun R: Reduced hippocampal activation during encoding and recognition of words in schizophrenia patients. Am J Psychiatry 2003; 160(7):1305-12
[0131] Tamminga C A, Thaker G K, Buchanan R, Kirkpatrick B, Alphs L D, Chase T N, Carpenter W T: Limbic system abnormalities identified in schizophrenia using positron emission tomography with fluorodeoxyglucose and neocortical alterations with deficit syndrome. Arch Gen Psychiatry 1992; 49(7):522-30
[0132] Dickey C C, McCarley R W, Shenton M E: The brain in schizotypal personality disorder: a review of structural MRI and CT findings. Harv Rev Psychiatry 2002; 10(1):1-15
[0133] McCarley R W, Wible C G, Frumin M, Hirayasu Y, Levitt J J, Fischer I A, Shenton M E: MRI anatomy of schizophrenia. Biol Psychiatry 1999; 45(9):1099-119
[0134] Kishimoto H, Yamada K, Iseki E, Kosaka K, Okoshi T: Brain imaging of affective disorders and schizophrenia. Psychiatry Clin Neurosci 1998; 52 Suppl:S212-4
[0135] Fannon D, Simmons A, Tennakoon L, O'Ceallaigh S, Sumich A, Doku V, Shew C, Sharma T: Selective deficit of hippocampal N-acetylaspartate in antipsychotic-naive patients with schizophrenia. Biol Psychiatry 2003; 54(6):587-98
[0136] Bertolino A, Nawroz S, Mattay V S, Barnett A S, Duyn J H, Moonen C T, Frank J A, Tedeschi G, Weinberger D R: Regionally specific pattern of neurochemical pathology in schizophrenia as assessed by multislice proton magnetic resonance spectroscopic imaging. Am J Psychiatry 1996; 153(12):1554-63
[0137] Weinberger D R: Cell biology of the hippocampal formation in schizophrenia. Biol Psychiatry 1999; 45(4):395-402
[0138] Arnold S E, Trojanowski J Q: Recent advances in defining the neuropathology of schizophrenia. Acta Neuropathol (Berl) 1996; 92(3):217-31
[0139] Byne W, Buchsbaum M S, Mattiace L A, Hazlett E A, Kemether E, Elhakem S L, Purohit D P, Haroutunian V, Jones L: Postmortem assessment of thalamic nuclear volumes in subjects with schizophrenia. Am J Psychiatry 2002; 159(1):59-65
[0140] Velakoulis D, Stuart G W, Wood S J, Smith D J, Brewer W J, Desmond P, Singh B, Copolov D, Pantelis C: Selective bilateral hippocampal volume loss in chronic schizophrenia. Biol Psychiatry 2001; 50(7):531-9
[0141] Harrison P J: The neuropathology of schizophrenia. A critical review of the data and their interpretation. Brain 1999; 122 (Pt 4):593-624
[0142] Beasley C L, Zhang Z J, Patten I, Reynolds G P: Selective deficits in prefrontal cortical
[0143] GABAergic neurons in schizophrenia defined by the presence of calcium-binding proteins. Biol Psychiatry 2002; 52(7):708-15
[0144] Mirnics K, Middleton F A, Marquez A, Lewis D A, Levitt P: Molecular characterization of schizophrenia viewed by microarray analysis of gene expression in prefrontal cortex. Neuron 2000; 28(1):53-67
[0145] Vawter M P, Barrett T, Cheadle C, Sokolov B P, Wood W H, 3rd, Donovan D M, Webster M, Freed W J, Becker K G: Application of cDNA microarrays to examine gene expression differences in schizophrenia. Brain Res Bull 2001; 55(5):641-50
[0146] Bahn S, Augood S J, Ryan M, Standaert D G, Starkey M, Emson P C: Gene expression profiling in the post-mortem human brain—no cause for dismay. J Chem Neuroanat 2001; 22(1-2):79-94
[0147] Middleton F A, Mirnics K, Pierri J N, Lewis D A, Levitt P: Gene expression profiling reveals alterations of specific metabolic pathways in schizophrenia. J Neurosci 2002; 22(7):2718-29
[0148] Hakak Y, Walker J R, Li C, Wong W H, Davis K L, Buxbaum J D, Haroutunian V, Fienberg A A: Genome-wide expression analysis reveals dysregulation of myelination-related genes in chronic schizophrenia. Proc Natl Acad Sci USA 2001; 98(8):4746-51
[0149] Davis K L, Stewart D G, Friedman J I, Buchsbaum M, Harvey P D, Hof P R, Buxbaum J, Haroutunian V: White matter changes in schizophrenia: evidence for myelin-related dysfunction. Arch Gen Psychiatry 2003; 60(5):443-56
[0150] Freedman R, Adams C E, Leonard S: The alpha7-nicotinic acetylcholine receptor and the pathology of hippocampal interneurons in schizophrenia. J Chem Neuroanat 2000; 20(3-4):299-306
[0151] Bertolino A, Callicott J H, Mattay V S, Weidenhammer K M, Rakow R, Egan M F, Weinberger
[0152] DR: The effect of treatment with antipsychotic drugs on brain N-acetylaspartate measures in patients with schizophrenia. Biol Psychiatry 2001; 49(1):39-46
[0153] Buchsbaum M S, Shihabuddin L, Hazlett E A, Schroder J, Haznedar M M, Powchik P, Spiegel-Cohen J, Wei T, Singer M B, Davis K L: Kraepelinian and non-Kraepelinian schizophrenia subgroup differences in cerebral metabolic rate. Schizophr Res 2002; 55(1-2):25-40
[0154] Knable M B, Barci B M, Webster M J, Meador-Woodruff J, Torrey E F: Molecular abnormalities of the hippocampus in severe psychiatric illness: postmortem findings from the Stanley Neuropathology Consortium. Mol Psychiatry 2004
[0155] Luo L, Salunga R C, Guo H, Bittner A, Joy K C, Galindo J E, Xiao H, Rogers K E, Wan J S, Jackson M R, Erlander M G: Gene expression profiles of laser-captured adjacent neuronal subtypes. Nat Med 1999; 5(1):117-22
[0156] Ma X J, Salunga R, Tuggle J T, Gaudet J, Enright E, McQuary P, Payette T, Pistone M, Stecker K, Zhang B M, Zhou Y X, Varnholt H, Smith B, Gadd M, Chatfield E, Kessler J, Baer T M, Erlander M G, Sgroi D C: Gene expression profiles of human breast cancer progression. Proc Natl Acad Sci USA 2003; 100(10):5974-9
[0157] Jurata L, Bukhman Y V, Charles V D, Capriglione F, Bullard J, Lemire A, Laeng P, Mohammed A, Pham Q, Brockman J A, Altar C A: Comparison of mRNA profiling technologies for identification of psychiatric disease and drug signatures. J. Neurosci. Meth. 2004; In Press
[0158] Torrey E F, Webster M, Knable M, Johnston N, Yolken R H: The stanley foundation brain collection and neuropathology consortium. Schizophr Res 2000; 44(2):151-5
[0159] Van Gelder R N, von Zastrow M E, Yool A, Dement W C, Barchas J D, Eberwine J H: Amplified RNA synthesized from limited quantities of heterogeneous cDNA. Proc Natl Acad Sci USA 1990; 87(5):1663-7
[0160] Eberwine J: Amplification of mRNA populations using aRNA generated from immobilized oligo(dT)-T7 primed cDNA. Biotechniques 1996; 20(4):584-91
[0161] Quackenbush J: Microarray data normalization and transformation. Nat Genet 2002; 32 Suppl:496-501
[0162] Abramowitz M, Stegun I A: Logarithmic Function. New York: Dover, 1972
[0163] Venables W N, Ripley B D: Modem applied statistics with S., Springer, 2002
[0164] Slonim D K: From patterns to pathways: gene expression data analysis comes of age. Nat Genet 2002; 32 Suppl:502-8
[0165] Hosack D A, Dennis G, Jr., Sherman B T, Lane H C, Lempicki R A: Identifying biological themes within lists of genes with EASE. Genome Biol 2003; 4(10):R70
[0166] Zeeberg B R, Feng W, Wang G, Wang M D, Fojo A T, Sunshine M, Narasimhan S, Kane D W, Reinhold W C, Lababidi S, Bussey K J, Riss J, Barrett J C, Weinstein J N: GoMiner: a resource for biological interpretation of genomic and proteomic data. Genome Biol 2003; 4(4):R28
[0167] Li J Z, Vawter M P, Walsh D M, Tomita H, Evans S J, Choudary P V, Lopez J F, Avelar A, Shokoohi V, Chung T, Mesarwi o, Jones E G, Watson S J, Akil H, Bunney W E, Jr., Myers R M: Systematic changes in gene expression in postmortem human brains associated with tissue pH and terminal medical conditions. Hum Mol Genet 2004; 13(6):609-16
[0168] Kingsbury A E, Foster O J, Nisbet A P, Cairns N, Bray L, Eve D J, Lees A J, Marsden C D: Tissue pH as an indicator of mRNA preservation in human post-mortem brain. Brain Res Mol Brain Res 1995; 28(2):311-8
[0169] Lehrmann E, Hyde T M, Vawter M P, Becker K G, Kleinman J E, Freed W J: The use of microarrays to characterize neuropsychiatric disorders: postmortem studies of substance abuse and schizophrenia. Curr Mol Med 2003; 3(5):437-46
[0170] Sokolov B P, Jiang L, Trivedi N S, Aston C: Transcription profiling reveals mitochondrial, ubiquitin and signaling systems abnormalities in postmortem brains from subjects with a history of alcohol abuse or dependence. J Neurosci Res 2003; 72(6):756-67
[0171] Johnston N L, Cervenak J, Shore A D, Torrey E F, Yolken R H, Cerevnak J: Multivariate analysis of RNA levels from postmortem human brains as measured by three different methods of RT-PCR. Stanley Neuropathology Consortium. J Neurosci Methods 1997; 77(1):83-92
[0172] Harrison P J, Heath P R, Eastwood S L, Burnet P W, McDonald B, Pearson R C: The relative importance of premortem acidosis and postmortem interval for human brain gene expression studies: selective MRNA vulnerability and comparison with their encoded proteins. Neurosci Lett 1995; 200(3):151-4
[0173] Murphey R K, Godenschwege T A: New roles for ubiquitin in the assembly and function of neuronal circuits. Neuron 2002; 36(1):5-8
[0174] Hegde A N, DiAntonio A: Ubiquitin and the synapse. Nat Rev Neurosci 2002; 3(11):854-61
[0175] Pak D T, Sheng M: Targeted protein degradation and synapse remodeling by an inducible protein kinase. Science 2003; 302(5649):1368-73
[0176] Ehlers M D: Activity level controls postsynaptic composition and signaling via the ubiquitin-proteasome system. Nat Neurosci 2003; 6(3):231-42
[0177] Speese S D, Trotta N, Rodesch C K, Aravamudan B, Broadie K: The ubiquitin proteasome system acutely regulates presynaptic protein turnover and synaptic efficacy. Curr Biol 2003; 13(11):899-910
[0178] Knable M B, Torrey E F, Webster M J, Bartko J J: Multivariate analysis of prefrontal cortical data from the Stanley Foundation Neuropathology Consortium. Brain Res Bull 2001; 55(5):651-9
[0179] Hemby S E, Ginsberg S D, Brunk B, Arnold S E, Trojanowski J Q, Eberwine J H: Gene expression profile for schizophrenia: discrete neuron transcription patterns in the entorhinal cortex. Arch Gen Psychiatry 2002; 59(7):631-40
[0180] Hoglinger G U, Carrard G, Michel P P, Medja F, Lombes A, Ruberg M, Friguet B, Hirsch E C: Dysfunction of mitochondrial complex I and the proteasome: interactions between two biochemical deficits in a cellular model of Parkinson's disease. J Neurochem 2003; 86(5):1297-307
[0181] Prince J A, Yassin M S, Oreland L: Neuroleptic-induced mitochondrial enzyme alterations in the rat brain. J Pharmacol Exp Ther 1997; 280(1):261-7
[0182] Prince J A, Yassin M S, Orel and L: A histochemical demonstration of altered cyto chrome oxidase activity in the rat brain by neuroleptics. Eur Neuropsychopharmacol 1998; 8(1):1-6
[0183] Prince J A, Yassin M S, Oreland L: Normalization of cytochrome-c oxidase activity in the rat brain by neuroleptics after chronic treatment with PCP or methamphetamine. Neuropharmacology 1997; 36(11-12):1665-78
[0184] Prince J A, Oreland L: Mitochondrial Activity in the Mapping of Functional Brain Changes in Schizophrenia. Restor Neurol Neurosci 1998; 12(2,3):185-193
[0185] Holcomb H H, Cascella N G, Thaker G K, Medoff D R, Dannals R F, Tamminga C A: Functional sites of neuroleptic drug action in the human brain: PET/FDG studies with and without haloperidol. Am J Psychiatry 1996; 153(1):41-9
[0186] Desco M, Gispert J D, Reig S, Sanz J, Pascau J, Sarramea F, Benito C, Santos A, Palomo T, Molina V: Cerebral metabolic patterns in chronic and recent-onset schizophrenia. Psychiatry Res 2003; 122(2):125-35
[0187] Stone W S, Seidman L J, Wojcik J D, Green A I: Glucose effects on cognition in schizophrenia. Schizophr Res 2003; 62(1-2):93-103
[0188] Dwyer D, Lu X, Freeman A: Neuronal glucose metabolism and schizophrenia: therapeutic prospects? Expert Rev. Neurotherapeutics 2003; 3(1):89-100
[0189] Marchbanks R M, Mulcrone J, Whatley S A: Aspects of oxidative metabolism in schizophrenia. Br J Psychiatry 1995; 167(3):293-8
[0190] Maurer I, Zierz S, Moller H: Evidence for a mitochondrial oxidative phosphorylation defect in brains from patients with schizophrenia. Schizophr Res 2001; 48(1):125-36
[0191] Ben-Shachar D: Mitochondrial dysfunction in schizophrenia: a possible linkage to dopamine. J Neurochem 2002; 83(6):1241-51
[0192] Whatley S A, Curti D, Marchbanks R M: Mitochondrial involvement in schizophrenia and other functional psychoses. Neurochem Res 1996; 21(9):995-1004
[0193] Cavelier L, Jazin E E, Eriksson I, Prince J, Bave U, Oreland L, Gyllensten U: Decreased cytochrome-c oxidase activity and lack of age-related accumulation of mitochondrial DNA deletions in the brains of schizophrenics. Genomics 1995; 29(1):217-24
[0194] Buchsbaum M S, Nuechterlein K H, Haier R J, Wu J, Sicotte N, Hazlett E, Asarnow R, Potkin S, Guich S: Glucose metabolic rate in normals and schizophrenics during the Continuous Performance Test assessed by positron emission tomography. Br J Psychiatry 1990; 156:216-27
[0195] Nudmamud S, Reynolds L M, Reynolds G P: N-acetylaspartate and N-Acetylaspartylglutamate deficits in superior temporal cortex in schizophrenia and bipolar disorder: a postmortem study. Biol Psychiatry 2003; 53(12):1138-41
[0196] Prince J A, Harro J, Blennow K, Gottfries C G, Oreland L: Putamen mitochondrial energy metabolism is highly correlated to emotional and intellectual impairment in schizophrenics. Neuropsychopharmacology 2000; 22(3):284-92
[0197] Kung L, Roberts R C: Mitochondrial pathology in human schizophrenic striatum: a postmortem ultrastructural study. Synapse 1999; 31(1):67-75
[0198] Uranova N, Orlovskaya D, Vikhreva O, Zimina I, Kolomeets N, Vostrikov V, Rachmanova V: Electron microscopy of oligodendroglia in severe mental illness. Brain Res Bull 2001; 55(5):597-610
[0199] Tsai G, Passani L A, Slusher B S, Carter R, Baer L, Kleinman J E, Coyle J T: Abnormal excitatory neurotransmitter metabolism in schizophrenic brains. Arch Gen Psychiatry 1995; 52(10):829-36
[0200] Lauer M, Beckmann H, Senitz D: Increased frequency of dentate granule cells with basal dendrites in the hippocampal formation of schizophrenics. Psychiatry Res 2003; 122(2):89-97
[0201] Kraeplin E, Barclay R M: Dementia Praecox and Paraphrenia. New York, R. E. Krieger, 1971
[0202] Bleuler E: Dementia Praecox or the Group of Schizophrenias. New York, International Universities Press, 1950

The application's sequence listing, which the Patent Office published only in electronic form, follows.

SEQUENCE LISTING (249 sequences)

SEQ ID NO: 1 - DNA, 2379 bp, Homo sapiens
gagagtcggcgcccgcaacgcggagccgggaagtcgtcgctactctggtggaactcagagttggttctggaggcggcggacgcggaggtccctcagaggatccagcgaggggcgccaacaagaggcgaagaggtggcaccagggcggcggcaggaagaggagcgggagcaggagcgcggagcggagcgtcccgacccgccgtgcgtactttctggagggaaggggcgggggaatcggcccctgagggaagcgcccggtggcgagggggttagccaagttccggctgcggcgccactccctcggttccacgagaggaaagttttttttttccagacgcttccgccggctcgcgccctccgggcccagcctcccgagccttcggagcgggcgccgtcccagcccagctccggggaaacgcgagccgcgatgcctggggggtgctcccggggccccgccgccggggacgggcgtctgcggctggcgcgactagcgctggtactcctgggctgggtctcctcgtcttctcccacctcctcggcatcctccttctcctcctcggcgccgttcctggcttccgccgtgtccgcccagcccccgctgccggaccagtgccccgcgctgtgcgagtgctccgaggcagcgcgcacagtcaagtgcgttaaccgcaatctgaccgaggtgcccacggacctgcccgcctacgtgcgcaacctcttccttaccggcaaccagctggccgtgctccctgccggcgccttcgcccgccggccgccgctggcggagctggccgcgctcaacctcagcggcagccgcctggacgaggtgcgcgcgggcgccttcgagcatctgcccagcctgcgccagctcgacctcagccacaacccactggccgacctcagtcccttcgctttctcgggcagcaatgccagcgtctcggcccccagtccccttgtggaactgatcctgaaccacatcgtgccccctgaagatgagcggcagaaccggagcttcgagggcatggtggtggcggccctgctggcgggccgtgcactgcaggggctccgccgcttggagctggccagcaaccacttcctttacctgccgcgggatgtgctggcccaactgcccagcctcaggcacctggacttaagtaataattcgctggtgagcctgacctacgtgtccttccgcaacctgacacatctagaaagcctccacctggaggacaatgccctcaaggtccttcacaatggcaccctggctgagttgcaaggtctaccccacattagggttttcctggacaacaatccctgggtctgcgactgccacatggcagacatggtgacctggctcaaggaaacagaggtagtgcagggcaaagaccggctcacctgtgcatatccggaaaaaatgaggaatcgggtcctcttggaactcaacagtgctgacctggactgtgacccgattcttcccccatccctgcaaacctcttatgtcttcctgggtattgttttagccctgataggcgctattttcctcctggttttgtatttgaaccgcaaggggataaaaaagtggatgcataacatcagagatgcctgcagggatcacatggaagggtatcattacagatatgaaatcaatgcggaccccagattaacgaacctcagttctaactcggatgtctgagaaatattagaggacagaccaaggacaactctgcatgagatgtagacttaagctttatccctactaggcttgctccactttcatcctccactatagatacaacggactttgactaaaagcagtgaaggggatttgcttccttgttatgtaaagtttctcggtgtgttctgttaatgtaagacgatgaacagttgtgtatagtgttttaccctcttctttttcttggaactcctcaacacgtatggagggatttttcaggtttcagcatgaacatgggcttcttgctgtctgtctctctctcagtacagttcaaggtgtagcaagtgtacccacacagatagcattcaacaaaagctgcctcaactttttcgagaaaaatactttattcataaatatcagttttattctcatgtacctaagttgtggagaaaataattgcatcctataaactgcctgcagacgttagcaggctcttcaaaataactccatggtgcacaggagcacctgcatccaagagcatgcttacattttactgttctgcatattacaaaaaataacttgcaacttcataacttctttgacaaagtaaattacttttttgattgcagtttatatgaaaatgtactgatttttttttaataaactgcatcgagatccaaccgactgaattgttaaaaaaaaaaaaaaaaa

SEQ ID NO: 2 - DNA, 2740 bp, Homo sapiens
cgctgccatgcggctggcgctgctctgggccctggggctcctgggcgcgggcagccctctgccttcctggccgctcccaaatataggtggcactgaggagcagcaggcagagtcagagaaggccccgagggagcccttggagccccaggtccttcaggacgatctcccaattagcctcaaaaaggtgcttcagaccagtctgcctgagcccctgaggatcaagttggagctggacggtgacagtcatatcctggagctgctacagaatagggagttggtcccaggccgcccaaccctggtgtggtaccagcccgatggcactcgggtggtcagtgagggacacactttggagaactgctgctaccagggaagagtgcggggatatgcaggctcctgggtgtccatctgcacctgctctgggctcagaggcttggtggtcctgaccccagagagaagctataccctggagcaggggcctggggaccttcagggtcctcccattatttcgcgaatccaagatctccacctgccaggccacacctgtgccctgagctggcgggaatctgtacacactcagacgccaccagagcaccccctgggacagcgccacattcgccggaggcgggatgtggtaacagagaccaagactgtggagttggtgattgtggctgatcactcggaggcccagaaataccgggacttccagcacctgctaaaccgcacactggaagtggccctcttgctggacacattcttccggcccctgaatgtacgagtggcactagtgggcctggaggcctggacccagcgtgacctggtggagatcagcccaaacccagctgtcaccctcgaaaacttcctccactggcgcagggcacatttgctgcctcgattgccccatgacagtgcccagctggtgactggtacttcattctctgggcctacggtgggcatggccattcagaactccatctgttctcctgacttctcaggaggtgtgaacatggaccactccaccagcatcctgggagtcgcctcctccatagcccatgagttgggccacagcctgggcctggaccatgatttgcctgggaatagctgcccctgtccaggtccagccccagccaagacctgcatcatggaggcctccacagacttcctaccaggcctgaacttcagcaactgcagccgacgggccctggagaaagccctcctggatggaatgggcagctgcctcttcgaacggctgcctagcctaccccctatggctgctttctgcggaaatatgtttgtggagccgggcgagcagtgtgactgtggcttcctggatgactgcgtcgatccctgctgtgattctttgacctgccagctgaggccaggtgcacagtgtgcatctgacggaccctgttgtcaaaattgccagctgcgcccgtctggctggcagtgtcgtcctaccagaggggattgtgacttgcctgaattctgcccaggagacagctcccagtgtccccctgatgtcagcctaggggatggcgagccctgcgctggcgggcaagctgtgtgcatgcacgggcgttgtgcctcctatgcccagcagtgccagtcactttggggacctggagcccagcccgctgcgccactttgcctccagacagctaatactcggggaaatgcttttgggagctgtgggcgcaaccccagtggcagttatgtgtcctgcacccctagagatgccatttgtgggcagctccagtgccagacaggtaggacccagcctctgctgggctccatccgggatctactctgggagacaatagatgtgaatgggactgagctgaactgcagctgggtgcacctggacctgggcagtgatgtggcccagcccctcctgactctgcctggcacagcctgtggccctggcctggtgtgtatagaccatcgatgccagcgtgtggatctcctgggggcacaggaatgtcgaagcaaatgccatggacatggggtctgtgacagcaacaggcactgctactgtgaggagggctgggcaccccctgactgcaccactcagctcaaagcaaccagctccctgaccacagggctgctcctcagcctcctggtcttattggtcctggtgatgcttggtgccggctactggtaccgtgcccgcctgcaccagcgactctgccagctcaagggacccacctgccagtacagggcagcccaatctggtccctctgaacggccaggacctccgcagagggccctgctggcacgaggcactaagtctcaggggccagccaagcccccacccccaaggaagccactgcctgccgacccccagggccggtgcccatcgggtgacctgcccggcccaggggctggaatcccgcccctagtggtaccctccagaccagcgccaccgcctccgacagtgtcctcgctctacctctgacctctccggaggttccgctgcctccaagccggacttagggcttcaagaggcgggcgtgccctctggagtcccctaccatgactgaaggcgccagagactggcggtgtcttaagactccgggcaccgccacgcgctgtcaagcaacactctgcggacctgccggcgtagttgcagcgggggcttggggaggggctgggggttggacgggattgaggaaggtccgcacagcctgtctctgctcagttgcaataaacgtgacatcttgggagcgttaaaaaaaaaaaaaaa

SEQ ID NO: 3 - DNA, 6609 bp, Homo sapiens
ttcttttaaggagtttgccgcgagcgcgtctccttcattcgcaggctgggcgcgttcgcagtcggctggcggcgaaggaaggcgctctcgggacctcgcgggcgcgcgtcttttggctcttgcccctgtccctgcggcttggggaaggcgtaacccggcggctaggcgcgggagaagtgcggaggagccatgggcgccgggagctccaccgagcagcgcagcccggagcagccgcccgaggggagctccacgccggctgagcccgagcccagcggcggcggcccctcggccgaggcggcgccagacaccaccgcggaccccgccatcgctgcctcggaccccgccaccaagctcctacagaagaatggtcagctgtccaccatcaatggcgtagctgagcaagatgagctcagcctccaggagggtgacctaaatggccagaaaggagccctgaacggtcaaggagccctaaacagccaggaggaagaagaagtcattgtcacagaggttggacagagagactctgaagatgtgagcaaaagagactccgataaagagatggctactaagtcagcggttgttcacgacatcacagatgatgggcaggaggagacacccgaaataatcgaacagattccttcttcagaaagcaatttagaagagctaacacaacccactgagtcccaggctaatgatattggatttaagaaggtgtttaagtttgttggctttaaattcactgtgaaaaaggataagacagagaagcctgacactgtccagctactcactgtgaagaaagatgaaggggagggagcagcaggggctggcgaccacaaggaccccagccttggggctggagaagcagcatccaaagaaagcgaacccaaacaatctacagagaaacccgaagagaccctgaagcgtgagcaaagccacgcagaaatttctcccccagccgaatctggccaagcagtggaggaatgcaaagaggaaggagaagagaaacaagaaaaagaacctagcaagtctgcagaatctccgactagtcccgtgaccagtgaaacaggatcaaccttcaaaaaattcttcactcaaggttgggccggctggcgcaaaaagaccagtttcaggaagccgaaggaggatgaagtggaagcttcagagaagaaaaaggaacaagagccagaaaaagtagacacagaagaagacggaaaggcagaggttgcctccgagaaactgaccgcctccgagcaagcccacccacaggagccggcagaaagtgcccacgagccccggttatcagctgaatatgagaaagttgagctgccctcagaggagcaagtcagtggctcgcagggaccttctgaagagaaacctgctccgttggcgacagaagtgtttgatgagaaaatagaagtccaccaagaagaggttgtggccgaagtccacgtcagcaccgtggaggagagaaccgaagagcagaaaacggaggtggaagaaacagcagggtctgtgccagctgaagaattggttgaaatggatgcagaacctcaggaagctgaacctgccaaggagctggtgaagctcaaagaaacgtgtgtttccggagaggaccctacacagggagctgacctcagtcctgatgagaaggtgctgtccaaaccccccgaaggcgttgtgagtgaggtggaaatgctgtcatcacaggagagaatgaaggtgcagggaagtccactaaagaagctttttaccagcactggcttaaaaaagctttctggaaagaaacagaaagggaaaagaggaggaggagacgaggaatcaggggagcacactcaggttccagccgattctccggacagccaggaggagcaaaagggcgagagctctgcctcatcccctgaggagcccgaggagatcacgtgtctggaaaagggcttagccgaggtgcagcaggatggggaagctgaagaaggagctacttccgatggagagaaaaaaagagaaggtgtcactccctgggcatcattcaaaaagatggtgacgcccaagaagcgtgttagacggccttcggaaagtgataaagaagatgagctggacaaggtcaagagcgctaccttgtcttccaccgagagcacagcctctgaaatgcaagaagaaatgaaagggagcgtggaagagccaaagccggaagaaccaaagcgcaaggtggatacctcagtatcttgggaagctttaatttgtgtgggatcatccaagaaaagagcaaggagagggtcctcttctgatgaggaagggggaccaaaagcaatgggaggagaccaccagaaagctgatgaggccggaaaagacaaagagacggggacagacgggatccttgctggttcccaagaacatgatccagggcagggaagttcctccccggagcaagctggaagccctaccgaaggggagggcgtttccacctgggagtcatttaaaaggttagtcacgccaagaaaaaaatcaaagtccaagctggaagagaaaagcgaagactccatagctgggtctggtgtagaacattccactccagacactgaacccggtaaagaagaatcctgggtctcaatcaagaagtttattcctggacgaaggaagaaaaggccagatgggaaacaagaacaagcccctgttgaagacgcagggccaacaggggccaacgaagatgactctgatgtcccggccgtggtccctctgtctgagtatgatgctgtagaaagggagaaaatggaggcacagcaagcccaaaaaagcgcagagcagcccgagcagaaggcagccactgaggtgtccaaggagctcagcgagagtcaggttcatatgatggcagcagctgtcgctgacgggacgagggcagctaccattattgaagaaaggtctccttcttggatatctgcttcagtgacagaacctcttgaacaagtagaagctgaagccgcactgttaactgaggaggtattggaaagagaagtaattgcagaagaagaaccccccacggttactgaacctctgccagagaacagagaggcccggggcgacacggtcgttagtgaggcggaattgacccccgaagctgtgacagctgcagaaactgcagggccattgggtgccgaagaaggaaccgaagcatctgctgctgaagagaccacagaaatggtgtcagcagtctcccagttaaccgactccccagacaccacagaggaggccactccggtgcaggaggtggaaggtggcgtacctgacatagaagagcaagagaggcggactcaagaggtcctccaggcagtggcagaaaaagtgaaagaggaatcccagctgcctggcaccggtgggccagaagatgtgcttcagcctgtgcagagagcagaggcagaaagaccagaagagcaggctgaagcgtcgggtctgaagaaagagacggatgtagtgttgaaagtagatgctcaggaggcaaaaactgagccttttacacaagggaaggtggtggggcagaccaccccagaaagctttgaaaaagctcctcaagtcacagagagcatagagtccagtgagcttgtaaccacttgtcaagccgaaaccttagctggggtaaaatcacaggagatggtgatggaacaggctatcccccctgactcggtggaaacccctacagacagtgagactgatggaagcacccccgtagccgactttgacgcaccaggcacaacccagaaagacgagattgtggaaatccatgaggagaatgaggtcgcatctggtacccagtcagggggcacagaagcagaggcagttcctgcacagaaagagaggcctccagcaccttccagttttgtgttccaggaagaaactaaagaacaatcaaagatggaagacactctagagcatacagataaagaggtgtcagtggaaactgtatccattctgtcaaagactgaggggactcaagaggctgaccagtatgctgatgagaaaaccaaagacgtaccatttttcgaaggacttgaggggtctatagacacaggcataacagtcagtcgggaaaaggtcactgaagttgcccttaaaggtgaagggacagaagaagctgaatgtaaaaaggatgatgctcttgaactgcagagtcacgctaagtctcctccatcccccgtggagagagagatggtagttcaagtcgaaagggagaaaacagaagcagagccaacccatgtgaatgaagagaagcttgagcacgaaacagctgttaccgtatctgaagaggtcagtaagcagctcctccagacagtgaatgtgcccatcatagatggggcaaaggaagtcagcagtttggaaggaagccctcctccctgcctaggtcaagaggaggcagtatgcaccaaaattcaagttcagagctctgaggcatcattcactctaacagcggctgcagaggaggaaaaggtcttaggagaaactgccaacattttagaaacaggtgaaacgttggagcctgcaggtgcacatttagttctggaagagaaatcctctgaaaaaaatgaagactttgccgctcatccaggggaagatgctgtgcccacagggcccgactgtcaggcaaaatcgacaccagtgatagtatctgctactaccaagaaaggcttaagttccgacctggaaggagagaaaaccacatcactgaagtggaagtcagatgaagtcgatgagcaggttgcttgccaggaggtcaaagtgagtgtagcaattgaggatttagagcctgaaaatgggattttggaacttgagaccaaaagcagtaaacttgtccaaaacatcatccagacagccgttgaccagtttgtacgtacagaagaaacagccaccgaaatgttgacgtctgagttacagacacaagctcacgtgataaaagctgacagccaggacgctggacaggaaacggagaaagaaggagaggaacctcaggcctctgcacaggatgaaacaccaattacttcagccaaagaggagtcagagtcaaccgcagtgggacaagcacattctgatatttccaaagacatgagtgaagcctcagaaaagaccatgactgttgaggtagaaggttccactgtaaatgatcagcagctggaagaggtcgtcctcccatctgaggaagagggaggtggagctggaacaaagtctgtgccagaagatgatggtcatgccttgttagcagaaagaatagagaagtcactagttgaaccgaaagaagatgaaaaaggtgatgatgttgatgaccctgaaaaccagaactcagccctggctgatactgatgcctcaggaggcttaaccaaagagtccccagatacaaatggaccaaaacaaaaagagaaggaggatgcccaggaagtagaattgcaggaaggaaaagtgcacagtgaatcagataaagcgatcacaccccaagcacaggaggagttacagaaacaagagagagaatctgcaaagtcagaacttacagaatcttaaaacatcatgcagttaaactcattgtctgtttggaagaccagaatgtgaagacaagtagtagaagaaaatgaatgctgctgctgagactgaagaccagtatttcagaactttgagaattggagagcaggcacatcaactgatctcatttctagagagcccctgacaatcctgaggcttcatcaggagctagagccatttaacatttcctctttccaagaccaacctacaattttcccttgataaccatataaattctgatttaaggtcctaaattcttaacctggaactggagttggcaatacctagttctgcttctgaaactggagtatcattctttacatatttatatgtatgttttaagtagtcctcctgtatctattgtatatttttttcttaatgtttaaggaaatgtgcaggatactacatgctttttgtatcacacagtatatgatggggcatgtgccatagtgcaggcttggggagctttaagcctcagttatataacccacgaaaaacagagcctcctagatgtaacattcctgatcaaggtacaattctttaaaattcactaatgattgaggtccatatttagtggtactctgaaattggtcactttcctattacacggagtgtgctaaaactaaaaagcattttgaaacatacagaatgttctattgtcattgggaaatttttctttctaacccagtggaggttagaaagaagttatattctggtagcaaattaactttacatcctttttcctacttgttatggttgtttggaccgataagtgtgcttaatcctgaggcaaagtagtgaatatgttttatatgttatgaagaaaagaattgttgtaagtttttgattctactcttatatgctggactgcattcacacatggcatgaaataagtcaggttctttacaaatggtattttgatagatactggattgtgtttgtgccatatttgtgccattcttttaagaacaatgttgcaacacattcatttggataagttgtgatttgacgactgatttaaataaaatatttgcttcacttaaaaaaaaaaaa

SEQ ID NO: 4 - DNA, 1518 bp, Homo sapiens
ggccgctaggggtgcggggttggggaggaggccgctagtctacgcctgtggagccgatactcagccctctgcgaccatggctgtgctggcggcacttctgcgcagcggcgcccgcagccgcagccccctgctccggaggctggtgcaggaaataagatatgtggaacggagttatgtatcaaaacccactttgaaggaagtggtcatagtaagtgctacaagaacacccattggatcttttttaggcagcctttccttgctgccagccactaagcttggttccattgcaattcagggagccattgaaaaggcagggattccaaaagaagaagtgaaagaagcatacatgggtaatgttctacaaggaggtgaaggacaagctcctacaaggcaggcagtattgggtgcaggcttacctatttctactccatgtaccaccataaacaaagtttgtgcttcaggaatgaaagccatcatgatggcctctcaaagtcttatgtgtggacatcaggatgtgatggtggcaggtgggatggagagcatgtccaatgttccatatgtaatgaacagaggatcaacaccatatggtggggtaaagcttgaagatttgattgtaaaagacgggctaactgatgtctacaataaaattcatatgggcagctgtgctgagaatacagcaaagaagctgaatattgcacgaaatgaacaggacgcttatgctattaattcttataccagaagtaaagcagcatgggaagctgggaaatttggaaatgaagttattcctgtcacagttacagtaaaaggtcaaccagatgtagtggtgaaagaagatgaagaatataaacgtgttgattttagcaaagttccaaagctgaagacagttttccagaaagaaaatggcacagtaacagctgccaatgccagtacactgaatgatggagcagctgctctggttctcatgacggcagatgcagcgaagaggctcaatgttacaccactggcaagaatagtagcatttgctgacgctgctgtagaacctattgattttccaattgctcctgtatatgctgcatctatggttcttaaagatgtgggattgaaaaaagaagatattgcaatgtgggaagtaaatgaagcctttagtctggttgtactagcaaacattaaaatgttggagattgatccccaaaaagtgaatatcaatggaggagctgtttctctgggacatccaattgggatgtctggagccaggattgttggtcatttgactcatgccttgaagcaaggagaatacggtcttgccagtatttgcaatggaggaggaggtgcttctgccatgctaattcagaagctgtagacaacctctgctatttaaggagacaaccctatgtgaccagaaggcctgctgtaatcagtgtgactactgtgggtcagcttatattcagataagctgtttcattttttattattttctatgttaacttttaaaaatcaaaatgatgaaatcccaaaaca

SEQ ID NO: 5 - DNA, 1549 bp, Homo sapiens
tggcagtgcgcctgcgccgcgtcggcgtgcggaacgccgcggtgtctcggcgcctctgcgcgcgggaagatggcggaacaggctaccaagtccgtgctgtttgtgtgtctgggtaacatttgtcgatcacccattgcagaagcagttttcaggaaacttgtaaccgatcaaaacatctcagagaattggagggtagacagcgcggcaacttccgggtatgagatagggaacccccctgactaccgagggcagagctgcatgaagaggcacggcattcccatgagccacgttgcccggcagattaccaaagaagattttgccacatttgattatatactatgtatggatgaaagcaatctgagagatttgaatagaaaaagtaatcaagttaaaacctgcaaagctaaaattgaactacttgggagctatgatccacaaaaacaacttattattgaagatccctattatgggaatgactctgactttgagacggtgtaccagcagtgtgtcaggtgctgcagagcgttcttggagaaggcccactgaggcaggttcgtgccctgctgcggccagcctgactagaccccaccctgaggtcctgcatttctcagtcggtgtgtaatcacgttccagggcccaaagcccagctctttgttcagttgacttactgtttcttaccttaaaaagtaattgtagatggaaatcagttgtgtttggcaggagaatcaataaaaatctttgattcagacagcttatggggtattttaagcattcttagactagttgaacatctcactttgccccagttacaaaaatagtagaacaagcaacataaaacaatgaaggaaaacctcacttgaaggcccaggtcaacatctaagcctgttgagacttagataatcgagtctacctcttcagtaggtttgtgtggatggcctggagggcaggtgccctctgctccccagtgctacctctctcttccctagggccttttgtggattgacagtagtcccctccgtaggagctcacagtctagattagaagtgttttaatttctacacacccatagtgcacacttgtatattgaaaagatagggaagagagaaacatttatggaatcagtcgttggcaccttcaatacttcatgatttttgtcgagtttacttcatgaggaggtcagcccattggctcccatctgaaccactttgcctctgaaacttaattacatccagaaagaaggacacttgtatgctagtctatggtcagttgaggaatatgactgtttttatatgcacatgtaacccaaatgtccaatataaattggcttattttttaaaataattttaaaagttgggaaaagtgttattatttggcatgcttaaatattgaataagtattcttcatcagcatttaataaatgtataggcagatgtaaggtaatttctgtgtattttgagataatgtcaaaatcatgaatatttcaaaataaactggggagttataaaaatacaactagagatataaaaaaaaaaaaaaaaaaaaaaaaaaa

SEQ ID NO: 6 - DNA, 2900 bp, Homo sapiens
atgagtgtcagaagtgtgaagggtgcctgttctgaatcccagagcctcctctccctctgtgaggctggcaggtgaggaagggtttaacctcactggaaggaatccctggagctagcggctgctgaaggcgtcgaggtgtgggggcacttggacagaacagtcaggcagccgggagctctgccagctttggtgaccttgggccgggctgggagcgctgcggcgggagccggaggactatgagctgccgcgcgttgtccagagcccagcccagccctacgcgcgcggcccggagctctgttccctggaactttgggcactgcctctgggacccctgccggccagcaggcaggatggtgcttgcctcgtgccccttggtgcccgtctgctgatgtgcccagcctgtgcccgccatgccgccctccatctcagctttccaggccgcctacatcggcatcgaggtgctcatcgccctggtctctgtgcccgggaacgtgctggtgatctgggcggtgaaggtgaaccaggcgctgcgggatgccaccttctgcttcatcgtgtcgctggcggtggctgatgtggccgtgggtgccctggtcatccccctcgccatcctcatcaacattgggccacagacctacttccacacctgcctcatggttgcctgtccggtcctcatcctcacccagagctccatcctggccctgctggcaattgctgtggaccgctacctccgggtcaagatccctctccggtacaagatggtggtgaccccccggagggcggcggtggccatagccggctgctggatcctctccttcgtggtgggactgacccctatgtttggctggaacaatctgagtgcggtggagcgggcctgggcagccaacggcagcatgggggagcccgtgatcaagtgcgagttcgagaaggtcatcagcatggagtacatggtctacttcaacttctttgtgtgggtgctgcccccgcttctcctcatggtcctcatctacctggaggtcttctacctaatccgcaagcagctcaacaagaaggtgtcggcctcctccggcgacccgcagaagtactatgggaaggagctgaagatcgccaagtcgctggccctcatcctcttcctctttgccctcagctggctgcctttgcacatcctcaactgcatcaccctcttctgcccgtcctgccacaagcccagcatccttacctacattgccatcttcctcacgcacggcaactcggccatgaaccccattgtctatgccttccgcatccagaagttccgcgtcaccttccttaagatttggaatgaccatttccgctgccagcctgcacctcccattgacgaggatctcccagaagagaggcctgatgactagaccccgccttccgctcccaccagcccacatccagtggggtctcagtccagtcctcacatgcccgctgtcccaggggtctccctgagcctgccccagctgggctgttggctgggggcatgggggaggctctgaagagatacccacagagtgtggtccctccactaggagttaactaccctacacctctgggccctgcaggaggcctgggagggcaagggtcctacggagggaccaggtgtctagaggcaacagtgttctgagcccccacctgcctgaccatcccatgagcagtccagcgcttcagggctgggcaggtcctggggaggctgagactgcagaggagccacctgggctgggagaaggtgcttgggcttctgcggtgaggcaggggagtctgcttgtcttagatgttggtggtgcagccccaggaccaagcttaaggagaggagagcatctgctctgagacggatggaaggagagaggttgaggatgcactggcctgttctgtaggagagactggccagaggcagctaaggggcaggaatcaaggagcctccgttcccacctctgaggactctggaccccaggccataccaggtgctagggtgcctgctctccttgccctgggccagcccaggattgtacgtgggagaggcagaaagggtaggttcagtaatcatttctgatgatttgctggagtgctggctccacgccctggggagtgagcttggtgcggtaggtgctggcctcaaacagccacgaggtggtagctctgagccctccttcttgccctgagctttccggggaggagcctggagtgtaattacctgtcatctgggccaccagctccactggcccccgttgccgggcctggactgtcctaggtgaccccatctctgctgcttctgggcctgatggagaggagaacactagacatgccaactcgggagcattctgcctgcctgggaacggggtggacgagggagtgtctgtaaggactcagtgttgactgtaggcgcccctggggtgggtttagcaggctgcagcaggcagaggaggagtacccccctgagagcatgtgggggaaggccttgctgtcatgtgaatccctcaatacccctagtatctggctgggttttcaggggctttggaagctctgttgcaggtgtccgggggtctaggactttagggatctgggatctggggaaggaccaacccatgccctgccaagcctggagcccctgtgttggggggcaaggtgggggagcctggagcccctgtgtgggagggcgaggcgggggagcctggagcccctgtgtgggagggcgaggcgggggatcctggagcccctgtgtcggggggcgagggaggggaggtggccgtcggttgaccttctgaacatgagtgtcaactccaggacttgcttccaagcccttccctctgttggaaattgggtgtgccctggctcccaagggaggcccatgtgactaataaaaaactgtgaaccct

SEQ ID NO: 7 - DNA, 2642 bp, Homo sapiens
acttccgggaacgccggggaaccgcagtagccgcctgctagtggcgctgctagccggccggcgcaggctgccgagcgggtgagcgcgcaggccaggccaaagccctggtacccgcgcggtgcgggcctcagtctgcggccatgggggcgtccgcgcggctgctgcgagcggtgatcatgggggccccgggctcgggcaagggcaccgtgtcgtcgcgcatcactacacacttcgagctgaagcacctctccagcggggacctgctccgggacaacatgctgcggggcacagaaattggcgtgttagccaaggctttcattgaccaagggaaactcatcccagatgatgtcatgactcggctggcccttcatgagctgaaaaatctcacccagtatagctggctgttggatggttttccaaggacacttccacaggcagaagccctagatagagcttatcagatcgacacagtgattaacctgaatgtgccctttgaggtcattaaacaacgccttactgctcgctggattcatcccgccagtggccgagtctataacattgaattcaaccctcccaaaactgtgggcattgatgacctgactggggagcctctcattcagcgtgaggatgataaaccagagacggttatcaagagactaaaggcttatgaagaccaaacaaagccagtcctggaatattaccagaaaaaaggggtgctggaaacattctccggaacagaaaccaacaagatttggccctatgtatatgctttcctacaaactaaagttccacaaagaagccagaaagcttcagttactccatgaggagaaatgtgtgtaactattaatagtaagatgggcaaacctcctagtccttgcatttagaagctgcttttcctaagacttctagtatgtatgaattctttgaaaattatattacttttatttctactgattttattttggatactaaggatgtgccaaatgattcggatactaagatgcatcgtttgaaatcatctagtgtgttgtatgcagttatcctcaaaaacatcagcgatgtctgaacctttaaaacatctgttagagcaaaattaaaagagcatttggtagtaatctaactttttgttcagttaataagtggttgataaagtttccatatttttctggaaaagttaaaaaaagttacatgtcatttggagaaaatacgtaatcagaaatttgtgcatagattgatgccaaaaaagacatttccagcattgtggaacatggtgagacactatataaaattccagaaagaaagcaactggatttacagatttattgtgagacacaaattcactgctgcctttacactaagaaatgtatatgttaaccatatatgctgtatttattttgtcgttaagcatactttcagtttactcagaattttcaatttgctataaagatgtatcaattagcatatagaaaaatattactttaagatgacttgtttcctttgaaaatacctgtgtactgagggttatgatttgtgtcaaaaattgacataagtgcttttacaagcaccaaagttgaatgaattttcaacaaaatgtaattaaagtctatgttttcagttatgactcaggttaagaaatgtgttttaggatctacttgctggtttttctttttgatccaaatgtgtgatctgccctgataaataacaagttatagtaccatctcccccgccaataaaaaagagaagaaaaaagagaaacccgtggcactatgtaaataaagtaagcatactttgttgttagtaaatagatgaggcatgcctgggaaatgctcccttggcataaatagcaatcaattataattagtaaacaggtgtaccaataaaaagaatttacatgataggttaacaaggaccaggaaagtgagtttcctgaaggagttctttgttcctgatcaaagaaattgatacctgttagcattcactgccaccatattttaaggagaaagaactctattggtgtcgtctgagcagccatttaaaaattggaatctaaaggatggttgctgatgtactgtgtggtctggtagaagtggggaaatatgagagatggaggaaaaacttgattatgtcttccatggcatatttactcttactttacttcgtgccaaatcaaatgaaacaagccgtcttacaagtcgttattgcctttaaaaatctgttccgtttttttcccaggtacttaaaatacaagtgccagtaagtggttcttatgtgttttggggggaaaattttatttcccttttcttctgatatttaaaaaattcatcgatctttcaagatgaaccaaggttttttaaaagaaatataggaaacacttcattctttataaaactttctataatgccttatttgaatgttaatcttatgtgctttctaaaaaatgttgtgaaataccaaacttatggattatcactaggttatcaagcatatattagtctttatcagaataaaatgaaatttcataactgtggctattactttgttcttggtccttcacagggcctgctccatcccaccttcctttctgctgcctgatgtctcaatggcttctgaatgactgttctaataaatgatcttaaaacagt

SEQ ID NO: 8 - DNA, 2614 bp, Homo sapiens
attgcggagagcggctgatcgcagtccggaggtgaggcggaactctgagcaggtggtccattatggctgacatgcaaaatctggtagaaagattggagagggcagtgggccgcctggaggcagtatctcatacctctgacatgcaccgtgggtatgcagacagtccttcaaaagcaggagcagctccatatgtgcaggcatttgactcgctgcttgctggtcctgtggcagagtacttgaagatcagtaaagagattgggggagacgtgcagaaacatgcggagatggtccacacaggtttgaagttggagcgagctctgttggttacagcttctcagtgtcaacagccagcagaaaataagctttccgatttgttggcacccatctcagagcagatcaaagaagtgataacctttcgggagaagaaccgaggcagcaagttgtttaatcacctgtcagctgtcagcgaaagtatccaggccctgggctgggtggctatggctcccaagcctggcccttatgtgaaagaaatgaatgatgccgccatgttttatacaaaccgagtcctcaaagagtacaaagatgtggataagaagcatgtagactgggtcaaagcttatttaagtatatggacagagctgcaggcttacattaaggagttccataccaccggactggcctggagcaaaacggggcctgtggcaaaagaactgagcggactgccatctggaccctctgccggatcaggtcctcctccccctccaccaggcccccctcctcccccagtctctaccagttcaggctcagatgagtctgcttcccgctcagcactgttcgcgcagattaatcagggggagagcattacacatgccctgaaacatgtatctgatgacatgaagactcacaagaaccctgccctgaaggctcagagtggtccagtacgcagtggccccaaaccattctctgcacctaaaccccaaaccagcccatcccccaaacgagccacaaagaaggagccagctgtacttgaactggagggcaagaagtggagagtggaaaatcaggaaaatgtttccaacctggtgattgaggacacagagctgaaacaggtggcttacatatacaagtgtgtcaacacgacattgcaaatcaagggcaaaattaactccattacagtagataactgtaagaaacttggcctggtattcgatgacgtggtgggcattgtggagataatcaacagtaaggatgtcaaagttcaggtaatgggtaaagtgccaaccatatccatcaacaaaacagatggctgccatgcttacctgagcaagaattccctggattgtgaaatagtcagtgccaaatcttccgagatgaatgtcctcattcctacagaaggcggtgactttaatgaattcccagttcctgagcagttcaagaccctatggaacgggcagaagttggtcaccacagtgacagaaattgctggataagcgaagtgccactgggttctttgccctcccttcacaccatgggataaatctgtatcaagacggttcttttctagatttcctctacctttttgctcttaaaactgcttctctgctctgagaagcacagctacctgccttcactgaaatatacctcaggctgagatttggggtgggatagcaggtcagttgatcttctgcaggaaggtgcagcttttccatatcagctcaaccacgccgccagtccattcttaaggaactgccgactaggactgatgatgcattttagctttgagcttttgggggttattctaccaacaaacagtccattggaaagaaaacagtccctggaattaacagatcagaatgttcacactggttaatctttttttaacaatgagcatgaaggtagcagaagctggtgtgtttccagatggttcttctaaccaaactaatttttcactgttgacaagcgaggcaagggttgcactggaccaaaggctgaggcttggccatctagcattccatacaaaattgtttcctataagcattccttttattctctattctatcctgggtctgcctcaaccgtgagataggagagtctctggtactagctgctgtagcagtgcccttcatccagggcagttaatggagtcttggaccctttctttctctgggatccctgcccagcaccttcctatagagatgactttaaaaggaaaaaaaaaaaaaaacccacatgatttcaaggagtctggcattcctgaatccttcttccctgccaggtgcctgtcacctgtcttcactgcctccttttccctgtcatgctcatcagcttatggcttctgtctaagcacctgaacagaggactgaaacctccactgcaggctggttttaggtcttgaattatgtaagaatcttgcacagcactgctaatgtaaatttcagttgtttttccctctaggacaaacacttaccaaaatatgcaacttttttttggtgggaagagagattgtcctgtgatttctacccatttcctgaggcctgtggaaataaacctttatgtacttaaagttatacagaaaatagaataaagttaataccaaacttgaaaaagcggccgc

SEQ ID NO: 9 - DNA, 1887 bp, Homo sapiens
ccatggcggcgcggcggcgacggagcaccggcggcggcagggcgagagcattaaatgaaagcaaaagagttaataatggcaacacggctccagaagactcttcccctgccaagaaaactcgtagatgccagagacaggagtcgaaaaagatgcctgtggctggaggaaaagctaataaggacaggacagaagacaagcaagatggtatgccaggaaggtcatgggccagcaaaagggtctctgaatctgtgaaggccttgctgttaaagggcaaagctcctgtggacccagagtgtacagccaaggtggggaaggctcatgtgtattgtgaaggaaatgatgtctatgatgtcatgctaaatcagaccaatctccagttcaacaacaacaagtactatctgattcagctattagaagatgatgcccagaggaacttcagtgtttggatgagatggggccgagttgggaaaatgggacagcacagcctggtggcttgttcaggcaatctcaacaaggccaaggaaatctttcagaagaaattccttgacaaaacgaaaaacaattgggaagatcgagaaaagtttgagaaggtgcctggaaaatatgatatgctacagatggactatgccaccaatactcaggatgaagaggaaacaaaaaaagaggaatctcttaaatctcccttgaagccagagtcacagctagatcttcgggtacaggagttaataaagttgatctgtaatgttcaggccatggaagaaatgatgatggaaatgaagtataataccaagaaagccccacttgggaagctgacagtggcacaaatcaaggcaggttaccagtctcttaagaagattgaggattgtattcgggctggccagcatggacgagctctcatggaagcatgcaatgaattctacaccaggattccgcatgactttggactccgtactcctccactaatccggacacagaaggaactgtcagaaaaaatacaattactagaggctttgggagacattgaaattgctattaagctggtgaaaacagagctacaaagcccagaacacccattggaccaacactatagaaacctacattgtgccttgcgcccccttgaccatgaaagttacgagttcaaagtgatttcccagtacctacaatctacccatgctcccacacacagcgactataccatgaccttgctggatttgtttgaagtggagaaggatggtgagaaagaagccttcagagaggaccttcataacaggatgcttctatggcatggttccaggatgagtaactgggtgggaatcttgagccatgggcttcgaattgcccaccctgaagctcccatcacaggttacatgtttgggaaaggaatctactttgctgacatgtcttccaagagtgccaattactgctttgcctctcgcctaaagaatacaggactgctgctcttatcagaggtagctctaggtcagtgtaatgaactactagaggccaatcctaaggccgaaggattgcttcaaggtaaacatagcaccaaggggctgggcaagatggctcccagttctgcccacttcgtcaccctgaatgggagtacagtgccattaggaccagcaagtgacacaggaattctgaatccagatggttataccctcaactacaatgaatatattgtatataaccccaaccaggtccgtatgcggtaccttttaaaggttcagtttaatttccttcagctgtggtgaatgttgatcttaaataaaccagagatctgatcttcaagcaagaaaataagcagtgttgtacttgtgaattttgtgatattttatgtaataaaaactgtacaggtctaaaaaaaaaaaaaaaaaaaaaaaaaaa

SEQ ID NO: 10 - DNA, 1556 bp, Homo sapiens
agcgccacctgcctcattgtgcccaggagttctccaaacccgcgctgcggagtgagtgaccaagttccggccagttcgacctcgaggatccagaggtggagacggtactacctcccagctctgttttccatccccttcaggtccttcctcgggaggcggcgaaggcggtccaccctgcgcgtgatcctttatgcccggcccctgcccctccctccgggtggaacttccccctcaccgccagacttaagctgaggatcgttggatctctggcggggtgcagaactgagcccaggccacagtaccctattcacgctctgtgcttgtgccaaggtttcaagtgatcctcccgcctcagcctgcccaggtgctgagattacatgtatgagccactgcacctggaaaggagccagaaatgtgaagtgctagctgaaggatgagcagcagctagccaggcaaagggggcaatggcggcttcctgtgttctactgcacactgggcagaagatgcctctgattggtctgggtacctggaagagtgagcctggtcaggtaaaagcagctgttaagtatgcccttagcgtaggctaccgccacattgattgtgctgctatctacggcaatgagcctgagattggggaggccctgaaggaggacgtgggaccaggcaaggcggtgcctcgggaggagctgtttgtgacatccaagctgtggaacaccaagcaccaccccgaggatgtggagcctgccctccggaagactctggctgacctccagctggagtatctggacctgtacctgatgcactggccttatgcctttgagcggggagacaaccccttccccaagaatgctgatgggactatatgctacgactccacccactacaaggagacttggaaggctctggaggcactggtggctaaggggctggtgcaggcgctgggcctgtccaacttcaacagtcggcagattgatgacatactcagtgtggcctccgtgcgtccagctgtcttgcaggtggaatgccacccatacttggctcaaaatgagctaattgcccactgccaagcacgtggcctggaggtaactgcttatagccctttgggctcctctgatcgtgcatggcgtgatcctgatgagcctgtcctgctggaggaaccagtagtcctggcattggctgaaaagtatggccgatctccagctcagatcttgctcaggtggcaggtccagcggaaagtgatctgcatccccaaaagtatcactccttctcgaatccttcagaacatcaaggtgtttgacttcacctttagcccagaagagatgaagcagctaaatgccctgaacaaaaattggagatatattgtgcctatgcttacggtggatgggaagagagtcccaagggatgcagggcatcctctgtacccctttaatgacccgtactgagaccacagcttcttggcctcccttccagctctgcagctaatgaggtcctgccacaacggaaagagggagttaataaagccattggagcatccaaaaaaaaaaaaaaaaaaaaaa

SEQ ID NO: 11 - DNA, 1551 bp, Homo sapiens
cctgagctcaggagtttgagaccagcctgtctctactaacaatataaaaattagctgggagtcacggtgggcgcctgtaatcccagctactcgggaggctgaggcaggagaattgcttgaacccaggagacagaggttgtagtgagctgagatcgcaccactgcactctagccttggcaacagtgcaagactgtctcaaaaacagcaacagagagcaggacgtgagacttctacctgctcactcagaatcatttctgcaccaaccatggccacgtttgtggagctcagtaccaaagccaagatgcccattgtgggcctgggcacttggaagtctcctcttggcaaagtgaaagaagcagtgaaggtggccattgatgcaggatatcggcacattgactgtgcctatgtctatcagaatgaacatgaagtgggggaagccatccaagagaagatccaagagaaggctgtgaagcgggaggacctgttcatcgtcagcaagttgtggcccactttctttgagagaccccttgtgaggaaagcctttgagaagaccctcaaggacctgaagctgagctatctggacgtctatcttattcactggccacagggattcaagtctggggatgaccttttccccaaagatgataaaggtaatgccatcggtggaaaagcaacgttcttggatgcctgggaggccatggaggagctggtggatgaggggctggtgaaagcccttggggtctccaatttcagccacttccagatcgagaagctcttgaacaaacctggactgaaatataaaccagtgactaaccaggttgagtgtcacccatacctcacacaggagaaactgatccagtactgccactccaagggcatcaccgttacggcctacagccccctgggctctccggatagaccttgggccaagccagaagacccttccctgctggaggatcccaagattaaggagattgctgcaaagcacaaaaaaaccgcagcccaggttctgatccgtttccatatccagaggaatgtgattgtcatccccaagtctgtgacaccagcacgcattgttgagaacattcaggtctttgactttaaattgagtgatgaggagatggcaaccatactcagcttcaacagaaactggagggcctgtaacgtgttgcaatcctctcatttggaagactatcccttcgatgcagaatattgaggttgaatctcctggtgagattatacaggagattctctttcttcgctgaagtgtgactacctccactcatgtcccattttagccaagcttatttaagatcacagtgaacttagtcctgttatagacgagaatcgaggtgctgttttagacatttatttctgtatgttcaactaggatcagaatatcacagaaaagcatggcttgaataaggaaatgacaattttttccacttatctgatcagaacaaatgtttattaagcatcagaaactctgccaacactgaggatgtaaagatcaataaaaaaaataataatcataaaaaaaaaaaaaaaaaa

SEQ ID NO: 12 - DNA, 941 bp, Homo sapiens
gggggccgttggcgaagccagctgctggaggtgccgagaatctgagtttcggcaagcagccaggtctggaaactgtaacaggacattcagttagtaatgatggttgcaggttgaatagtctcgccctagatctcacctaacttgcagaatattttaaaaatgactacaccaaacaagacacctcctggtgctgaccccaagcagttggaaaggactggaacagtacgggaaattgggtcacaagctgtttggtcactctcatcttgcaaaccaggatttggagtggatcagttacgagatgacaatctagaaacttattggcaatcagatggttcccagcctcatttagtgaacatccaattcagaagaaaaacaacagtgaagacattatgtatttatgcagactacaaatctgatgaaagctatactccaagcaagatctcagtcagagtaggaaataattttcacaacctacaagaaattcggcaacttgagttggtggaaccaagtggctggattcatgttcccttaactgacaatcataagaagccaactcgttcattcatgatacagattgctgttctagccaatcacctgaatggaagagacacccatatgagacaaattaaaatatacacaccagtagaagagagctccattggtaaatttcctagatgtacaactatagatttcatgatgtatcgttcaataaggtgactttaaaatgagacgaaaatcattaaacgtatctttgttttatcctgtattcaaataatatatcatgtacctttattgaacaaggcatccgttatatctaattttgtatatgtttaaaaatattttattgtaactttgacaaataaatttggggtcatattatctttattttctttaacatgtaataaagctcacatattttacaaaaaaaaaaaaaaaaaaac

SEQ ID NO: 13 - DNA, 2047 bp, Homo sapiens
gcgcgggtccccgggtctgacaggagcagcctgtgggcaccgcggcggtagttggaggcgggagagggtccgtagccgcgccgccctgccccgccatgggcctcctgtcggacccggttcgccggcgcgcgctcgcccgcctagtgctgcgcctcaacgcgccgttgtgcgtgctgagctacgtggcgggcatcgcctggttcttggcgctggttttcccgccgctgacccagcgcacttacatgtcggagaacgccatgggctccaccatggtggaggagcagtttgcgggcggagaccgtgcccgggcttttgcccgggacttcgccgcccaccgcaagaagtcgggggctctgccagtggcctggcttgaacggacgatgcggtcagtagggctggaggtctacacgcagagtttctcccggaaactgcccttcccagatgagacccacgagcgctatatggtgtcgggcaccaacgtgtacggcatcctgcgggccccgcgtgctgccagcaccgagtcgcttgtgctcaccgtgccctgtggctctgactctaccaacagccaggctgtggggctgctgctggcactggctgcccacttccgggggcagatttattgggccaaagatatcgtcttcctggtaacagaacatgaccttctgggcactgaggcttggcttgaagcctaccacgatgtcaatgtcactggcatgcagtcgtctcccctgcagggccgagctggggccattcaggcagccgtggccctggagctgagcagtgatgtggtcaccagcctcgatgtggccgtggaggggcttaacgggcagctgcccaaccttgacctgctcaatctcttccagaccttctgccagaaagggggcctgttgtgcacgcttcagggcaagctgcagcccgaggactggacatcattggatggaccgctgcagggcctgcagacactgctgctcatggttctgcggcaggcctccggccgcccccacggctcccatggcctcttcctgcgctaccgtgtggaggccctaaccctgcgtggcatcaatagcttccgccagtacaagtatgacctggtggcagtgggcaaggctttggagggcatgttccgcaagctcaaccacctcctggagcgcctgcaccagtccttcttcctctacttgctccccggcctctcccgcttcgtctccatcggcctctacatgcccgctgtcggcttcttgctcctggtccttggtctcaaggctctggaactgtggatgcagctgcatgaggctggaatgggccttgaggagcccgggggtgcccctggccccagtgtaccccttcccccatcacagggtgtggggctggcctcgctcgtggcacctctgctgatctcacaggccatgggactggccctctatgtcctgccagtgctgggccaacacgttgccacccagcacttcccagtggcagaggctgaggctgtggtgctgacactgctggcgatttatgcagctggcctggccctgccccacaatacccaccgggtggtaagcacacaggccccagacaggggctggatggcactgaagctggtagccctgatctacctagcactgcagctgggctgcatcgccctcaccaacttctcactgggcttcctgctggccaccaccatggtgcccactgctgcgcttgccaagcctcatgggccccggaccctttatgctgccctgctggtgctgaccagcccggcagccacgctccttggcagcctgttcctgtggcgggagctgcaggaggcgccactgtcactggccgagggctggcagctcttcctggcagcgctagcccagggtgtgctggagcaccacacctacggcgccctgctcttcccactgctgtccctgggcctctacccctgctggctgcttttctggaatgtgctcttctggaagtgagatctgcctgtccgggctgggacagagactccccaaggaccccattctgcctccttctggggaaataaatgagtgtctgtttcagc

SEQ ID NO: 14 - DNA, 2469 bp, Homo sapiens
cccagacacctgctcactcaccaccagctgggctccgctgggcctgcccggcacccaccccggccaccaagggcagcagcttttccagaatttggctggcaggcctagtcaccccacctcgccacctcaccactgcacctcggaggccagccctgtccactccactctgtgcctggcttctcttgcctgccttgggccttcgtgtggccctccacggtgtctgggactgagtgcccctcttgcctcctgaagagcagccatggccacctacaaagtcagggtggccacaggcaccgacctcttgtcgggaacacgggactccatctcactgaccattgtggggacacaaggagagagccataagcagctgctgaaccactttgggagagactttgcaactggggcggtgggccagtacaccgtgcagtgccctcaggacctgggtgagctcatcatcatccgcctgcacaaagagcggtacgccttcttccccaaggacccttggtactgcaactatgtgcagatctgtgcccccaacggccgtatctaccacttccccgcctaccagtggatggatggctacgagaccctggcactccgggaggccacaggaaagacaacagcagatgactcgctccccgtcctcctggagcacagaaaagaggagatcagagccaagcaggacttctaccactggcgagtctttcttcctggcctgcccagctatgtgcacattcccagttaccgccctccggtgcggaggcatcgcaaccccaaccggcctgagtggaatggctatattccgggattcccaattctcatcaactttaaggccaccaagttcctgaacttaaatctccgctactccttcctcaagacggcctccttcttcgtccgcctggggcccatggcactggctttcaaagtccgcggcctgttggactgcaaacattcgtggaagaggctgaaggacattaggaaaattttccctggcaagaaatctgtcgtctccgagtacgtggccgagcactgggcagaggacaccttctttgggtaccagtacctcaacggcgtcaaccccggcctgatccgccgctgcacgcggatcccagacaagttccccgtcacagacgacatggtggctccgttcctgggcgagggaacgtgcttgcaagcggagctggagaaggggaacatttacctggccgactaccgcatcatggagggcatccccaccgtggagctcagcggccggaagcagcaccactgcgcccccctctgcctgctgcactttggacccgagggcaagatgatgcccatcgccatccagctcagccagacccctgggccagattgccccatcttcctgcccagtgattctgagtgggactggctgctagccaagacgtgggtacgctatgcggagttctacagccacgaggccatcgcccacctgctggagacacacctcattgctgaggccttctgcctggccttgctgaggaacctgcccatgtgccaccccctctacaagctcctcatcccccatacccgatacaccgtccagatcaacagcattggccgggccgttctcctcaatgagggggggctctctgccaagggcatgtccctgggcgtggaaggctttgctggggtgatggtacgggctctgtcggagctcacctatgacagcctctacctccccaatgactttgtggagcgtggggtccaggacctgcctggatattactaccgcgatgacagcttggcggtgtggaatgcactggagaagtatgtgacggagatcatcacctattattacccgagtgacgcagccgtggagggtgatccggaattgcagtcttgggtgcaggaaatatttaaagagtgcctcctggggcgggagagctcaggcttccctaggtgcttgcgaaccgtgcctgagctgatccgatatgtcactatagtcatctacacctgctctgccaagcacgctgctgtcaacacaggccagatggagttcaccgcctggatgcccaacttcccagcgtccatgcggaatccaccgattcagactaaggggctgaccactctggagaccttcatggacacgttgccggatgtgaagaccacgtgcatcacgctgctggtgctctggaccctcagccgagagcctgacgacaggcggcccctgggacacttcccggacattcacttcgtggaggaggccccgcggaggagcatagaggcgttccgccagcgcctgaaccagatctcacacgacatccgccagcgcaacaagtgccttcccatcccctactactacctggacccggtgctgattgagaacagcatttctatttaggagcgcgcttcccgtctctcctctccccattctgtgccctactattttcaacaaaacaaaacaaacaagcaaaaaacacaaaaacctcagagaccaaaacacca

SEQ ID NO: 15 - DNA, 2120 bp, Homo sapiens
ggatccgcggccgccgctgatgggaggatggacgtactggtgtctgagtgctccgcgcggctgctgcagcaggaagaagagattaaatctctgactgctgaaattgaccggttgaaaaactgtggctgtttaggagcttcttcaaatttggagcagttacaagaagaaaatttaaaattaaagtatcgactgaatattcttcgaaagagtcttcaggcagaaaggaacaaaccaactaaaaatatgattaacattattagccgcctacaagaggtctttggtcatgcaattaaggctgcatatccagatttggaaaatcctcctctgctagtgacaccaagtcagcaggccaagtttggggactatcagtgtaatagtgctatgggtatttctcagatgcttaaaaccaaggaaccggaagttaatccaggggaatttgctgaaaacattaccaaacacctcccggccatggatgttttgaaaagagttgaatttgctggccctggctttattaatggccacttaagaaaggattttgtatcagaacaattgaccagtcttctagtgaatggagttcaactacctgctctgggagagaataaaaaggttatagttgacttttcctcccctaatatagctaaagagatgcatgtaggccacctgaggtcaactatcataggagagagtataagccgcctctttgaatttgcagggtatgacgtgctcaggttaaatcatgtaggagactgggggacccagtttggcatgctcatcgctcacctgcaagacaaatttccagattatctaacagtttcacctcctattggggatcttcaggtcttttataaggaatctaagaagaggtttgatactgaggaggaatttaagaagcgagcatatcagtgtgtagttctgctccagggtaaaaacccagatattacaaaagcttatctgctgatgtctgatgtctcccgccaagagttaaataaaatctatgatgcattggacgtctctttaatagagagaggggaatccttctatcaagataggatgaatgatattgtaaaggaatttgaagatagaggatttgtgcaggtggatgatggcagaaagattgtatttgtcccagggtgttccataccattaaccatagtaaaatcagatggaggttatacctatgatacatctgacctggctgctattaaacaaagactatttgaggaaaaagcagatatgattatctatgttgtggacaatggacaatctgtgcacttccagacaatatttgctgctgctcaaatgattggttggtatgaccctaaagtaactcgagtcttccatgctggatttggtgtggtgctaggggaagacaagaaaaagtttaaaacacgttcgggtgaaacagtgcgcctcatggatcttctgggagaaggactaaaacgatccatggacaagttgaaggaaaaagaaagagacaaggtcttaactgcagaggaattgaatgctgctcagacatccgttgcatatggctgcatcaaatatgctgacctttcccataaccggttgaatgactacatcttctcctttgacaaaatgctagatgacagaggaaatacagctgcttacttgttgtatgccttcactagaatcaggtctattgcacgtctggccaatattgatgaagaaatgctccaaaaagctgctcgagaaaccaagattcttttggttcatgagaaggaatggaaactaggccggtgcattttacggttccctgagattctgcaaaagattttagatgacttatttctccacactctctgtgattatatatatgagctggcaactgctttcacagagttctatgatagctgctactgtgtggagaaagatagacagactgggaaaatattgaaggtgaacatgtggcgtatcttgtgtgaaacagtagctgctgtcatggccaaggggtttgataccctggggataaaacctggcccaagggtgtaatccctcacaggtttgaaccctgtgtgttttttcccaagtggccattggccctgtttgctttttttcaatcttgtgggcacaagcataagttaaggaaatttttcacccaggca

SEQ ID NO: 16 - DNA, 1330 bp, Homo sapiens
aggaaccggaacccgcggttataaagtaaaggaacccgagatctgcgcaggggttccctttgccgatttctctcacctcacctttcaaacctaaactcgagcctactgttcaccggcctagcattgctctcgccatggctctcagcgatgctgacgtgcaaaagcagataaagcatatgatggctttcattgaacaagaagccaatgagaaagcagaagaaatagatgcaaaggcagaagaagagttcaacatagagaaaggtcggcttgtgcaaacccaaagactaaagattatggaatattatgagaagaaagagaaacagattgagcagcagaagaaaattcagatgtccaatttgatgaatcaagcgagactcaaagtcctcagagcaagagatgaccttatcacagacctactaaatgaagcaaaacagagactcagcaaggtggtaaaagatacaaccaggtaccaagtgctgctggatggactggttctccagggtttgtaccagttgctggagccccgaatgattgttcgttgcaggaaacaagatttccctctggtaaaggctgcagtgcagaaggcaattcctatgtacaaaattgccaccaaaaacgatgttgatgtccaaattgaccaggagtcctacctgcctgaagacatagctggtggagttgagatctataatggagatcgtaaaataaaggtttccaacaccctggaaagccggctggatctcatagcccagcagatgatgccagaagtccggggagccttgtttggtgcaaatgccaacaggaagtttttggactaagccttcaggaggtggagctcgtcgtcagctctcctgctgtgatgtggaagcttctgatatttgaagaaacacgaatgtctctgtagcttcctcttcactgccccagtattgctctgtatttatcagcgatgcccctctgtcactcatgccttgcctaattgttcacaatggtggaaagcttcatgtaatatgatcaggacccacctccagttcttctgaaagtgtgacagtgtccagccggttctgcagcactaggggagggggcagatggtggttgcatgggcttcctgggtctccactctccgtctggcctaaaggtgatgtatttggtgtttggccctgcagtccccactcttgaggcttaaggcgcatgtggcacaccactccttccagcagtagtcgctttactgttacctgtttaggcctagaagttttccctcatctgtaaatgtgatttaaaatctaagccatgaatatgctttatttattaaaagagttatgcggatttaatgtga

SEQ ID NO: 17 - DNA, 1311 bp, Homo sapiens
tagtcgggcggggttgtgagacgccgcgctcagcttccatcgctgggcggtcaacaagtgcgggcctggctcagcgcgggggggcgcggagaccgcgaggcgaccgggagcggctgggttcccggctgcgcgcccttcggccaggccgggagccgcgccagtcggagcccccggcccagcgtggtccgcctccctctcggcgtccacctgcccggagtactgccagcgggcatgaccgacccaccaggggcgccgccgccggcgctcgcaggccgcggatgaagaagaaaacccggcgccgctcgacccggagcgaggagttgacccggagcgaggagttgaccctgagtgaggaagcgacctggagtgaagaggcgacccagagtgaggaggcgacccagggcgaagagatgaatcggagccaggaggtgacccgggacgaggagtcgacccggagcgaggaggtgaccagggaggaaatggcggcagctgggctcaccgtgactgtcacccacagcaatgagaagcacgaccttcatgttacctcccagcagggcagcagtgaaccagttgtccaagacctggcccaggttgttgaagaggtcataggggttccacagtcttttcagaaactcatatttaagggaaaatctctgaaggaaatggaaacaccgttgtcagcacttggaatacaagatggttgccgggtcatgttaattgggaaaaagaacagtccacaggaagaggttgaactaaagaagttgaaacatttggagaagtctgtggagaagatagctgaccagctggaagagttgaataaagagcttactggaatccagcagggttttctgcccaaggatttgcaagctgaagctctctgcaaacttgataggagagtaaaagccacaatagagcagtttatgaagatcttggaggagattgacacactgatcctgccagaaaatttcaaagacagtagattgaaaaggaaaggcttggtaaaaaaggttcaggcattcctagccgagtgtgacacagtggagcagaacatctgccaggagactgagcggctgcagtctacaaactttgccctggccgagtgaggtgtagcagaaaaaggctgtgctgccctgaagaatggcgccaccagctctgccgtctctggatcggaatttacctgatttcttcagggctgctgggggcaactggccatttgccaattttcctactctcacactggttctcaatgaaaaatagtgtctttgtgatttgagtaaagctcctattctgtttttcacaaaaaaaaaaaaa

SEQ ID NO: 18 - DNA, 3119 bp, Homo sapiens
cagtgcagatgttcctgggaggtcaagttaagagtcaaaaataattcattagatttaacaatttagcatggacatgtacttgtagacaggattcaaagcagttaagaatgtctctgccaagtcgacaaacagctattattgttaaccctcctccaccagaatatataaatactaagaaaaatgggcgattgacaaatcaacttcagtatctacaaaaagttgtcctaaaggatttatggaagcatagtttttcatggccctttcaacgtcctgtggatgctgtgaaactacagttgcctgattattataccattataaaaaacccaatggatttaaatacaattaagaagcgcttggagaataaatattatgcgaaggcttcagaatgtatagaagacttcaatacaatgttctcaaattgttatttatataacaagcctggagatgacattgttcttatggcacaagctctagagaagctgtttatgcagaaattatctcagatgccacaagaagagcaagttgtgggtgttaaggaaagaatcaagaaaggcactcaacagaatatagctgtttcttctgctaaagaaaaatcatcacccagcgcaacagaaaaagtatttaagcagcaagaaattccttctgtatttcctaagacatctatttctcccttgaacgtggtacagggagcttcagtcaactccagttcacaaactgcggcccaagttacaaaaggtgtgaagaggaaagcagatacaacaactcctgcaacttcagcagttaaagcaagtagtgaattttctccaacattcacagaaaaatcagtggcactgccacctataaaagaaaatatgccaaagaatgttttgccagattctcagcaacaatataatgttgtgaagactgttaaagtaactgaacaattaaggcactgtagtgagattcttaaagaaatgcttgcaaagaaacatttttcatatgcatggcccttttataatcctgttgacgttaatgctttgggactccataactactatgacgttgtcaaaaatccgatggatcttggaactattaaggagaaaatggataaccaagaatataaggatgcatacaaatttgcggcagatgttagattaatgttcatgaattgctacaagtacaatcctccagatcacgaagttgtgacaatggcaagaatgcttcaggatgttttcgaaacgcatttttcaaagatcccgattgaacctgttgagagtatgcctttatgttacatcaaaacagatatcacagaaaccactggtagagagaacactaatgaagcctcctctgaagggaactcttctgatgattctgaagatgagcgagttaagcgtcttgcaaagcttcaggagcagcttaaagctgtacatcaacagctccaggttttgtcccaagtacctttccgtaagctaaataaaaagaaagagaagtctaaaaaggaaaagaaaaaagaaaaggttaataacagcaatgaaaatccaagaaaaatgtgtgagcaaatgaggctaaaggaaaagtccaagagaaatcagccaaagaaaaggaaacaacagttcattggtctaaaatctgaagatgaagataatgctaaacctatgaactatgatgagaaaaggcagttaagtctgaatataaacaaactccctggagataaacttgggcgagtagttcacataatacaatcaagagagccttctctgagcaattccaatcctgatgagatagagatagactttgaaacactgaaagcatcaacactaagagaattagaaaaatatgtttcggcatgtctaagaaagagaccattaaaacctcctgctaagaaaataatgatgtccaaagaagaacttcactcacagaaaaaacaggaattggaaaagcggttactggatgttaataatcagttaaattctagaaaacgtcaaacaaaatctgataaaacgcaaccatccaaagctgttgaaaatgtttcccgactgagtgagagcagcagcagcagcagcagctcatcagagtctgaaagtagcagcagtgacttaagctcttcagacagcagtgattctgaatcagaaatgttccctaagtttacagaagtaaaaccaaatgattctccttctaaagagaatgtaaagaaaatgaagaatgaatgcatactgcctgaaggaagaacaggcgtcacacagataggatattgtgtgcaagacacaacctctgccaatactacccttgttcatcagaccacaccttcacatgtaatgccaccaaatcaccaccaattagcatttaattatcaagaattagaacatttacagactgtgaaaaacatttcacctttacaaattctgcctccctcaggtgattctgaacagctctcaaatggcataactgtgatgcatccatctggtgatagtgacacaacgatgttagaatctgaatgtcaagctcctgtacagaaggatataaagattaagaatgcagattcatggaaaagtttaggcaaaccagtgaaaccatcaggtgtaatgaaatcctcagatgagctcttcaaccaatttagaaaagcagccatagaaaaggaagtaaaagctcggacacaggaactcatacggaagcatttggaacaaaatacaaaggaactaaaagcatctcaagaaaatcagagggatcttgggaatggattgactgtagaatctttttcaaataaaatacaaaacaagtgctctggagaagagcagaaagaacatcagcagtcatcagaagctcaagataaatccaaactctggcttctcaaagaccgtgatttagcaaggcagaaagaacaagagaggaggaggagagaagcaatggtgggtaccattgatatgacccttcaaagtgacattatgacaatgtttgaaaacaactttgattaaaactcagtttttaaattaaccatcaacttaaaatgaatggtaaaagatcaaaatgcatatggtaaaatgattgctttcagataacaagataccaatcttatattgtattttgactgctctaaaatgattaaacagttttcacttacatttttaaaaaaaaaaaaaaaa

SEQ ID NO: 19 - DNA, 3085 bp, Homo sapiens
gacggccgccggagccgcgaggccaactgtcgcctggttgggcccggaaatgggacgtcgcgctttctcagggagcgtagaagcagccagggcctctccaagccgctgctgtgacagaaagtgagtgagctgccggaggatgtccaccgccacgacagtcgcccccgcggggatcccggcgaccccgggccctgtgaacccaccccccccggaggtctccaaccccagcaagcccggccgcaagaccaaccagctgcagtacatgcagaatgtggtggtgaagacgctctggaaacaccagttcgcctggcccttctaccagcccgtggacgcaatcaaattgaacctgccggattatcataaaataattaaaaacccaatggatatggggactattaagaagagactagaaaataattattattggagtgcaagcgaatgtatgcaggacttcaacaccatgtttacaaattgttacatttataacaagcccacagatgacatagtgctaatggcccaagctttagagaaaatttttctacaaaaagtggcccagatgccccaagaggaagttgaattattaccccctgctccaaagggcaaaggtcggaagccggctgcgggagcccagagcgcaggtacacagcaagtggcggccgtgtcctctgtctccccagcgaccccctttcagagcgtgccccccaccgtctcccagacgcccgtcatcgctgccacccctgtaccaaccatcactgcaaacgtcacgtcggtcccagtccccccagctgccgccccacctcctcctgccacacccatcgtccccgtggtccctcctacgccgcctgtcgtcaagaaaaagggcgtgaagcggaaagcagacacaaccactcccacgacgtcggccatcactgccagccggagtgagtcgcccccgccgttgtcagaccccaagcaggccaaagtggtggcccggcgggagagtggtggccgccccatcaagcctcccaagaaggacctggaggacggcgaggtgccccagcacgcaggcaagaagggcaagctgtcggagcacctgcgctactgcgacagcatcctcagggagatgctatccaagaagcacgcggcctacgcctggcccttctacaagccagtggatgccgaggccctggagctgcacgactaccacgacatcatcaagcacccgatggacctcagcaccgtgaaaaggaagatggatggccgagagtacccagacgcacagggctttgctgctgatgtccggctgatgttctcgaattgctacaaatacaatcccccagaccacgaggttgtggccatggcccggaagctccaggacgtgtttgagatgaggtttgccaagatgccagatgagcccgtggaggcaccggcgctgcctgcccccgcggcccccatggtgagcaagggcgctgagagcagccgtagcagtgaggagagctcttcggactcaggcagctcggactcggaggaggagcgggccaccaggctggcggagctgcaggagcagctgaaggccgtgcacgagcagctggccgccctgtctcaggccccagtaaacaaaccaaagaagaagaaggagaagaaggagaaggagaagaagaagaaggacaaggagaaggagaaggagaagcacaaagtgaaggccgaggaagagaagaaggccaaggtggctccgcctgccaagcaggctcagcagaagaaggctcctgccaagaaggccaacagcacgaccacggccggcagacagctgaagaaaggcggcaagcaggcatctgcctcctacgactcagaggaagaggaggagggcctgcccatgagctacgatgaaaagcgccagcttagcctggacatcaaccggctgcccggggagaagctgggccgggtagtgcacatcatccaatctcgggagccctcgctcagggactccaaccccgacgagatagaaattgactttgagactctgaaacccaccactttgcgggaactggagagatatgtcaagtcttgtttacagaaaaagcaaaggaaaccgttctcagcaagcgggaagaaacaggcagccaagtcgaaagaggagctagctcaggaaaagaagaaggagctggaaaagcgtctgcaggatgtcagcgggcagctgagcagcagcaagaagcccgcccggaaagagaagcccggctcagcaccctcagggggcccgtccaggctcagcagcagcagctcctccgagtctgggagcagcagctccagcgggtccagctctgacagcagtgactcagaatgaactggcttcggacagaacaggacagatggatgtcgcacacgccgagactctgccgtacccctctgtggttcatattactacttctgttccatggtgtgcaggtctgcttcttaattcagtgttatgatatcttccagtttttgctttcataggtcagagatctatcttgtgtgtgcgttagacttgatgagaaggtgtgaactctgcagaaagtctcttcttcatcactgaattcagtcacttggagatgacaacttcaaatgctaacccgatgaccccagaaaaccgtgtgagattcgtaccgaagaaccttgtggaatccctttgcttaggcccaacctggtcgatagctcgagaaagaattttttccaaggaaatgtctcggatatgggtactgtatttgaaagctgttagctttgtcaacacgcattgtccttgtcatttgggccccgagctctgaccctcgtgtctgacgcggccacctctttctggaggggctgaggacagatgtgcctgcttgtggagaccaggctgggcctaagcgaagggtcatcgcagccccagcccggagcgtggagcccttggggggtggtcgggtgggatgtgcgttctccgctcgtggtgatgtcaggagctcctcggagggaacagagcggctgtgtatgcagcctgcaggtttccatacactgaagcttttacctcaactttaaaaaaaaaaaagaagaaaagattaaaaaaaaaaaaaaaaaactcgaggcatctatg

SEQ ID NO: 20 - DNA, 2109 bp, Homo sapiens
cgcgcagcgcgccggagtggtcggggcccgcggccgctcgcgcctctcgatgggcagctcgcacttgctcaacaagggcctgccgcttggcgtccgacctccgatcatgaacgggcccctgcacccgcggcccctggtggcattgctggatggccgggactgcacagtggagatgcccatcctgaaggacgtggccactgtggccttctgcgacgcgcagtccacgcaggagatccatgagaaggtcctgaacgaggctgtgggggccctgatgtaccacaccatcactctcaccagggaggacctggagaagttcaaagccctccgcatcatcgtccggattggcagtggttttgacaacatcgacatcaagtcggccggggatttaggcattgccgtctgcaacgtgcccgcggcgtctgtggaggagacggccgactcgacgctgtgccacatcctgaacctgtaccggcgggccacctggctgcaccaggcgctgcgggagggcacacgagtccagagcgtcgagcagatccgcgaggtggcgtccggcgctgccaggatccgcggggagaccttgggcatcatcggacttggtcgcgtggggcaggcagtggcgctgcgggccaaggccttcggcttcaacgtgctcttctacgacccttacttgtcggatggcgtggagcgggcgctggggctgcagcgtgtcagcaccctgcaggacctgctcttccacagcgactgcgtgaccctgcactgcggcctcaacgagcacaaccaccacctcatcaacgacttcaccgtcaagcagatgagacaaggggccttcctggtgaacacagcccggggtggcctggtggatgagaaggcgctggcccaggccctgaaggagggccggatccgcggcgcggccctggatgtgcacgagtcggaacccttcagctttagccagggccctctgaaggatgcacccaacctcatctgcaccccccatgctgcatggtacagcgagcaggcatccatcgagatgcgagaggaggcggcacgggagatccgcagagccatcacaggccggatcccagacagcctgaagaactgtgtcaacaaggaccatctgacagccgccacccactgggccagcatggaccccgccgtcgtgcaccctgagctcaatggggctgcctataggtaccctccgggcgtggtgggcgtggcccccactggcatcccagctgctgtggaaggtatcgtccccagcgccatgtccctgtcccacggcctgccccctgtggcccacccgccccacgccccttctcctggccaaaccgtcaagcccgaggcggatagagaccacgccagtgaccagttgtagcccgggaggagctctccagcctcggcgcctggggcagcgggcccggaaaccctcgaccagagtgtgtgagagcatgtgtgtggtggcccctggcactgcagagactggtccgggctgtcaggagggcgggagggcgcagcgctgggcctcgtgtcgcttgtcgtccgtcctgtgggcgctctgccctgtgtccttcgcgttcctcgttaagcagaagaagtcagtagttattctcccatgaacgttcttgtctgtgtacagtttttagaacattacaaaggatctgtttgcttagctgtcaacaaaaagaaaacctgaaggagcatttggaagtcaatttgaggtttttttttttggtttttttttttttgtattttggaacgtgccccagaatgaggcagttggcaaacttctcaggacaatgaatcttcccgtttttctttttatgccacacagtgcattgttttttctacctgcttgtcttatttttagcataatttagaaaaacaaaacaaaggctgtttttcctaattttggcatgaacccccccttgttccaaaatgaagacggcatcatcacgaagcagctccaaaaggaaaagcttggcaggtgccctcgtcctggggacgtggagggtggcacggtccccgcctgcaccagtgccgtcctgctgatgtggtaggctagcaatattttggttaaaatcatgtttgtggccgaacgggcccctgcacccg

SEQ ID NO: 21 - DNA, 3544 bp, Homo sapiens
gttgactgtgacacgggtgttacatatcttcctgtgccccttctccctgtagggtgaagctctgggcctcggcttttggtggggagataaaatccattgctgctaagtactccggttcccagcttctgcaaaagaaatacaaagagtatgagaaagacgttgccatagaagaaatcgatggcctccaactggtaaagaagctggcaaagaacatggaagagatgtttcacaagaagtctgaggccgtcaggcgtctggtggaggctgcagaagaagcacacctgaaacatgaatttgatgcagacttacagtatgaatacttcaatgctgtgctgataaatgaaagggacaaagacgggaattttttggagctgggaaaggaattcatcttagccccaaatgaccattttaataatttgcctgtgaacatcagtctaagtgacgtccaagtaccaacgaacatgtacaacaaagaccctgcaattgtcaatggggtttattggtctgaatctctaaacaaagtttttgtagataactttgaccgtgacccatctctcatatggcagtactttggaagtgcaaagggcttttttaggcagtatccggggattaaatgggaaccagatgagaatggagtcattgccttcgactgcaggaaccgaaaatggtacatccaggcagcaacttctccgaaagacgtggtcattttagttgacgtcagtggcagcatgaaaggactccgtctgactatcgcgaagcaaacagtctcatccattttggatacacttggggatgatgacttcttcaacataattgcttataatgaggagcttcactatgtggaaccttgcctgaatggaactttggtgcaagccgacaggacaaacaaagagcacttcagggagcatctggacaaacttttcgccaaaggaattggaatgttggatatagctctgaatgaggccttcaacattctgagtgatttcaaccacacgggacaaggaagtatctgcagtcaggccatcatgctcataactgatggggcggtggacacctatgatacaatctttgcaaaatacaattggccagatcgaaaggttcgcatcttcacatacctcattggacgagaggctgcgtttgcagacaatctaaagtggatggcctgtgccaacaaaggattttttacccaaatctccaccttggctgatgtgcaggagaatgtcatggaataccttcacgtgcttagccggcccaaagtcatcgaccaggagcatgatgtggtgtggaccgaagcttacattgacagcactctccctcaggcacaaaagctgactgatgatcagggccccgtcctgatgaccactgtagccatgcctgtgtttagtaagcagaacgaaaccagatcgaagggcattcttctgggagtggttggcacagatgtcccagtgaaagaacttctgaagaccatccccaaatacaagttagggattcacggttatgcctttgcaatcacaaataatggatatatcctgacgcatccggaactcaggctgctgtacgaagaaggaaaaaagcgaaggaaacctaactatagtagcgttgacctctctgaggtggagtgggaagaccgagatgacgtgttgagaaatgctatggtgaatcgaaagacggggaagttttccatggaggtgaagaagacagtggacaaagggaaacgggttttggtgatgacaaatgactactattatacagacatcaagggtactcctttcagtttaggtgtggcgctttccagaggtcatgggaaatatttcttccgagggaatgtaaccatcgaagaaggcctgcatgacttagaacatcccgatgtgtccttggcagatgaatggtcctactgcaacactgacctacaccctgagcaccgccatctgtctcagttagaagcgattaagctctacctaaaaggcaaagaacctctgctccagtgtgataaagaattgatccaagaagtcctttttgacgcggtggtgagtgcccccattgaagcgtattggaccagcctggccctcaacaaatctgaaaattctgacaagggcgtggaggttgccttcctcggcactcgcacgggcctctccagaatcaacctgtttgtcggggctgagcagctcaccaatcaggacttcctgaaagctggtgacaaggagaacatttttaacgcagaccatttccctctctggtaccgaagagccgctgagcagattccagggagcttcgtctactcgatcccattcagcactggaccagtcaataaaagcaatgtggtgacagcaagtacatccatccagctcctggatgaacggaaatctcctgtggtggcagctgtaggcattcagatgaaacttgaatttttccaaaggaagttctggactgccagcagacagtgtgcttccctggatggcaaatgctccatcagctgtgatgatgagactgtgaattgttacctcatagacaataatggatttattttggtgtctgaagactacacacagactggagacttttttggtgagatcgagggagctgtgatgaacaaattgctaacaatgggctcctttaaaagaattaccctttatgactaccaagccatgtgtagagccaacaaggaaagcagcgatggcgcccatggcctcctggatccttataatgccttcctctctgcagtaaaatggatcatgacagaacttgtcttgttcctggtggaatttaacctctgcagttggtggcactccgatatgacagctaaagcccagaaattgaaacagaccctggagccttgtgatactgaatatccagcattcgtctctgagcgcaccatcaaggagactacagggaatattgcttgtgaagactgctccaagtcctttgtcatccagcaaatcccaagcagcaacctgttcatggtggtggtggacagcagctgcctctgtgaatctgtggcccccatcaccatggcacccattgaaatcaggtataatgaatcccttaagtgtgaacgtctaaaggcccagaagatcagaaggcgcccagaatcttgtcatggcttccatcctgaggagaatgcaagggagtgtgggggtgcgccgagtctccaagcccagacagtcctccttctgctccctctgcttttgatgctcttctcaaggtgacactgactgagatgttctcttggcatgctaaatcatggataaactgtgaaccaaaatatggtgcaacatacgagacatgaatatagtccaaccatcagcatctcatcatgattttaaactgtgcgtgatataaactcttaaagatatgttgacaaaaagttatctttttactttgccagtcatgcaaatgtgagtttgccacatgataatcacccttcatcagaaatgggaccgcaagtggtaggcagtgtcccttctgcttgaaacctattgaaaccaatttaaaactgtgtactttttaaataaagtatattaaaatcataaaaaaaaaaaaaaaa

SEQ ID NO: 22 - DNA, 2795 bp, Homo sapiens
cggggacatgaggtggatactgttcattggggcccttattgggtccagcatctgtggccgagaaaaattttttggggaccaagttttgaggattaatgtcagaaatggagacgagatcagcaaattgagtcaactagtgaattcaaacaacttgaagctcaatttctggaaatctccctcctccttcaatcggcctgtggatgtcctggtcccatctgtcagtctgcaggcatttaaatccttcctgagatcccagggcttagagtacgcagtgacaattgaggacctgcaggcccttttagacaatgaagatgatgaaatgcaacacaatgaagggcaagaacggagcagtaataacttcaactacggggcttaccattccctggaagctatttaccacgagatggacaacattgccgcagactttcctgacctggcgaggagggtgaagattggacattcgtttgaaaaccggccgatgtatgtactgaagttcagcactgggaaaggcgtgaggcggccggccgtttggctgaatgcaggcatccattcccgagagtggatctcccaggccactgcaatctggacggcaaggaagattgtatctgattaccagagggatccagctatcacctccatcttggagaaaatggatattttcttgttgcctgtggccaatcctgatggatatgtgtatactcaaactcaaaaccgattatggaggaagacgcggtcccgaaatcctggaagctcctgcattggtgctgacccaaatagaaactggaacgctagttttgcaggaaagggagccagcgacaacccttgctccgaagtgtaccatggaccccacgccaattcggaagtggaggtgaaatcagtggtagatttcatccaaaaacatgggaatttcaagggcttcatcgacctgcacagctactcgcagctgctgatgtatccatatgggtactcagtcaaaaaggccccagatgccgaggaactcgacaaggtggcgaggcttgcggccaaagctctggcttctgtgtcgggcactgagtaccaagtgggtcccacctgcaccactgtctatccagctagcgggagcagcatcgactgggcgtatgacaacggcatcaaatttgcattcacatttgagttgagagataccgggacctatggcttcctcctgccagctaaccagatcatccccactgcagaggagacgtggctggggctgaagaccatcatggagcatgtgcgggacaacctctactaggcgatggctctgctctgtctacatttatttgtacccacacgtgcacgcactgaggccattgttaaaggagctctttcctacctgtgtgagtcagagccctctgggtttgtggagcacacaggcctgcccctctccagccagctccctggagtcgtgtgtcctggcggtgtccctgcaagaactggttctgccagcctgctcaattttggtcctgctgtttttgatgagccttttgtctgtttctccttccaccctgctggctgggcggctgcactcagcatcaccccttcctgggtggcatgtctctctctacctcatttttagaaccaaagaacatctgagatgattctctaccctcattcacatctagccaagccagtgacctttgctctggtggcactgtgggagacaccacttgtctttaggtgggtctcaaagatgatgtagaatttcctttaatttctcgcagtcttcctggaaaatattttcctttgagcagcaaatcttgtagggatatcagtgaaggtctctccctccctcctctcctgttttttttttttgaggcagagttttgctcttgttgcccaggctggagtgtgatgggctcgatcttggctcaccacaacctctgcctcctgggttcaagcaattctcctgcctcagcctcttgagtagcttggtttataggcgcatgccaccatgcctggctaattttgtgtttttagtagagacagggtttctccatgttggtcaggctggtctcaaactcccaacctcaggtgatctgccctccttggcctcccagagtgctgggattacagggggagccactgtgccggtcccgtcccctccttttttaggcctgaatacaaagtagaagatcactttccttcactgtgctgagaatttctagatactacagttcttactcctctcttccctttgttattcagtgtgaccaggatgggcgggaggggatctgtgtcactgtaggtactgtgcccaggaaggctgggtgaagtccccatctaaattgcaggatggcgaaattatccccatctgtcctaatgggcttccctcctctttgccttttgaactcacttcaaagatgtaggcctcatcttacaggtcctaaatcactcatctggcctggataatctcactgccctggcacattcccatttgtgctggggtatcctgtgtttccttgtcctggtttgtgtgtgtgtgtgtgtgtgtgtgtgtgtgtgtgtgtgtttgtgtgtgtgtgtctgtctattttgatccggcccaagttcctaagtagagcaagaattcatcaaccagctgcctttgtttcatttcacctcagcacgtaccatcgtcctttggggggttgtttgtttttgttttttgctttaaccaaaatgtttgtaaatcttaacctcctgcctaggatttgtacagcatttggtgtgtgcttataagccaataaatattcaatgtgagttccaaaaaaaaaaaaaaaaaaaaaaaaaaaaaa

SEQ ID NO: 23 - DNA, 2100 bp, Homo sapiens
acatcactgcgctggccgtccaaggtccgccgccccaccatgccgcccccgccgctgctgctgctccttacagtcctggtcgtcgccgctgcccggccggggtgcgagtttgagcggaaccccgccgccacctgcgtggacctgcagctcaggacctgcagcgatgccgcctacaaccacaccaccttccccaacctgcttcagcaccggtcgtgggaggtggtggaggccagctccgagtacatcctgctgagcgttctacaccagctcctggaaggccagtgcaacccggacctgcggctgctgggctgtgctgtgctggccccccggtgtgagggcggctgggtgcgcagaccctgccggcacatctgcgagggcctgcgggaggtctgccagcccgccttcgacgccattgacatggcctggccctacttccttgactgccaccgctacttcacgagagaggacgagggctgctatgacccgctggagaagcttcggggaggcctggaggctgacgaggcactgccctcagggctgccgcccaccttcatccgcttcagccaccactcctacgcccagatggtgcgtgtgctgaggcggacggcctcccgctgtgcccacgtggccaggacctacagcatcgggcgcagcttcgacggcagggagctgctggtcatcgagttctccagccgccccggccagcacgagctgatggagcccgaggtgaagctcatcggcaacattcatggcaacgaggtggcgggccgggagatgctcatctacctagcccagtacctgtgctctgagtacctgcttggtaacccccgcatccagcgcctgctcaacaccacccgcatccacctgctgccctccattaaccctgacggctatgaggtggcagctgccgagggtgccggctacaacgggtggacgagcgggaggcagaacgcgcagaacctggatctgaaccgaaatttcccggacctgacgtccgagtactaccggctggcggagacccgcggcgcacgcagcgaccacatccccatcccccagcactactggtggggtaaggtggccccggagacaaaggcaatcatgaagtggatgcagaccataccctttgtgctctcagccagccttcatgggggcgacctggtggtgtcctaccccttcgacttctccaagcacccccaggaggagaagatgttttctcccacgcccgacgagaagatgttcaagctgctgtccagagcctacgctgacgtccaccccatgatgatggacaggtcggagaataggtgtggaggcaatttcctgaagagggggagcatcatcaacggggcggactggtacagcttcacgggaggcatgtccgatttcaactacctgcacaccaactgctttgagatcacggtagagctgggctgtgtgaagttcccccccgaggaggccctgtacacactctggcagcacaacaaggagtcactcctgaatttcgtggagacggtgcaccggggcatcaaaggtgtggtgacagataaattcggcaagccagtcaaaaacgcccggatctcagtcaaaggcattcgccacgacatcaccacagccccagatggtgactactggagactgctgcccccaggtatccacattgtcattgcccaagcccctggctacgccaaagtcatcaagaaagtcatcatccccgcccggatgaagagggctggccgtgtggacttcattctgcaacctctggggatgggacccaagaactttattcatgggctgcggaggactgggccccacgacccgctgggaggtgccagctctttgggggaggccacggagcccgacccgctccgggcgcgcaggcagccctcggccgacgggagtaagccctggtggtggtcctacttcacatcgctgagcacccacaggccacgctggctgctcaagtactagccccggccccagcacccgccaggatgtggagaccgaggcccatctccgcatcccgggctcctggctcttgattttgtctgccacagacatcccacaaagccgctgccattttattaaagtgttttgatccacaaa

SEQ ID NO: 24 - DNA, 2943 bp, Homo sapiens
ccgaaagagaaaacaggccgcgcgggcggcagaggagccgggcgccgcaatggacgtgcgggcgctgccgtggctgccgtggctgctgtggctgctgtgccggggcggcggcgatgcggactcccgcgcccccttcaccccgacctggccgcggagccgcgagcgtgaagccgccgccttccgggaaagtcttaatagacatcgatacttgaattctttatttcccagtgaaaactccaccgccttctatggaataaatcagttttcctatttgtttcctgaagagtttaaagccatttatttaagaagcaaaccttccaagtttcccagatactcagcagaagtacatatgtccatccccaatgtgtctttgccgttaagatttgactggagggacaagcaggttgtgacacaagtgagaaaccagcagatgtgtggaggatgctgggccttcagcgtggtgggggcagtggaatctgcttatgcaataaaggggaagcccctggaagacctaagtgtccagcaggtcattgactgttcgtataataattatggctgcaatggaggctctactctcaatgctttgaactggttaaacaagatgcaagtaaaactggtgaaagattcagaatatccttttaaagcacaaaatggtctgtgccattacttttctggttcacattctggattttcaatcaaaggttattctgcatatgacttcagtgaccaagaagatgaaatggcaaaagcacttcttacctttggccctttggtagtcatagtagatgcagtgagctggcaagattatctgggaggcattatacagcatcactgctctagtggagaagcaaatcatgcagttctcataactgggtttgataaaacaggaagcactccatattggattgtgcggaattcctggggaagttcttggggagtagatggttatgcccatgtcaaaatgggaagtaatgtttgtggtattgcagattccgtttcttctatatttgtgtgacatgttgggcagatcaagagacagctacaaaaatgaaggttttcataatgcaatgtaacatagtacttcaaagtattattcaacttcaagtttcagcaactacctacaaaagattctaaggcctagtagtatttaaactaagtttcagaatgttcccttcttgtagagagatggacaaccaaagtcagtgggacaaactccagcacagaagcctgcgaggaagcctatggaatagtttcctgtcctgagacgaaattcagattaggagatattttaggcccctgcaactggggaaggctactgtttgtttttgtttgcttattatttatttgtttgtttattgtgagatatttcaggtgggatcaaagaggtcataagaatttattttcttttgtggggtgtaactactagctttagattacccctatacacaagaatggccaacctaaaattatgtgtgtcttgtacagttagttatattagcagccctctgagatggcgtatctatcggaaggatttcaaacaccaattgctttacctgaacaaatggtgcttaccctttgaacagcagagtgaccacgtagaaggaaggaaaagggcaaaatcgcttcagttaaactgaaattaaatgaacaataaggcaactatataagtaacttctagtagcattgcctgagagacaaattattgtttgataattttcattgtgaataggaatccaatagatcatattgcttactttgttctttttatactatagaataatattttgttctctagtatatcaaaataccaaaatattatctcatattttctccctctttctcttactctttaccaagttttcctggtggcttggcttccctgactaaagaattaagtctcatttttactttccatttctattttcttaccacttggttggctccctttgtctctgtacctttaccaacattaggatctcacctctttcttcctcccttaattcataagcaccactcctatcaaagtcccatctcttaaccctgggtatcaaacaaactgtgagttttccagaatctgtttcccagttttcccctcagctttcctggtctcccatccgaactgcttctttgtgcacctcttgttctttctcttggctcccagtcttgattcctgtgatcactcttgcatcactaattgcacaagtgatttcaggtgcaattctgattagcctgcgtccacacagtgatcgatgatcctatgtgcctagaaaggacactgtgtgctgctcatgacctgcaacaggaaaaaagccatttcttgttagcagtgtaagaaccttagagcaaaggagttgaccttctgattgaatataagcacaaccatattaaatgaatcaatacaagaaaattatttctgatactatgtatgtacatatttcttctctaaaatgtatcattcttttctaatgtatatgatctaacaaaaatgaaacatgaaatgcagtagcaaccactaaaaaaaaaaattcaaggacatctaactttttctctcacttttgccctttgtttatccttccctgtgattagataaacaaaataaaaaacaaaatgctgtatttctcttcttacgccagtcagaaccaatccgaaaagaatgtgtgttgactcaggtttggagttatttcaggaagacagatattgaccttttaattgataaatattcttattatcctggaatgccagaaaagaactatgtcctgcttgtctagtttgtattcgctgactttctatgtgatatagatgcatttgtaatactctttttcaagtgctaaaggatttctaaaatttcaaactgattaatatgtttctgctgttctggattttgatgacatttacaataaaacaacctacatttgactttggtttaaaaagaaaaaaaaaaaa

SEQ ID NO: 25 - DNA, 1837 bp, Homo sapiens
gagccgcgcacgggactgggaaggggacccacccgagggtccagccaccagccccctcactaatagcggccaccccggcagcggcggcagcagcagcagcgacgcagcggcgacagctcagagcagggaggccgcgccacctgcgggccggccggagcgggcagccccaggccccctccccgggcacccgcgttcatgcaacgcctggtggcctgggacccagcatgtctccccctgccgccgccgccgcctgcctttaaatccatggaagtggccaacttctactacgaggcggactgcttggctgctgcgtacggcggcaaggcggcccccgcggcgccccccgcggccagacccgggccgcgcccccccgccggcgagctgggcagcatcggcgaccacgagcgcgccatcgacttcagcccgtacctggagccgctgggcgcgccgcaggccccggcgcccgccacggccacggacaccttcgaggcggctccgcccgcgcccgcccccgcgcccgcctcctccgggcagcaccacgacttcctctccgacctcttctccgacgactacgggggcaagaactgcaagaagccggccgagtacggctacgtgagcctggggcgcctgggggccgccaagggcgcgctgcaccccggctgcttcgcgcccctgcacccaccgcccccgccgccgccgccgcccgccgagctcaaggcggagccgggcttcgagcccgcggactgcaagcggaaggaggaggccggggcgccgggcggcggcgcaggcatggcggcgggcttcccgtacgcgctgcgcgcttacctcggctaccaggcggtgccgagcggcagcagcgggagcctctccacgtcctcctcgtccagcccgcccggcacgccgagccccgctgacgccaaggcgcccccgaccgcctgctacgcgggggccgcgccggcgccctcgcaggtcaagagcaaggccaagaagaccgtggacaagcacagcgacgagtacaagatccggcgcgagcgcaacaacatcgccgtgcgcaagagccgcgacaaggccaagatgcgcaacctggagacgcagcacaaggtcctggagctcacggccgagaacgagcggctgcagaagaaggtggagcagctgtcgcgcgagctcagcaccctgcggaacttgttcaagcagctgcccgagcccctgctcgcctcctccggccactgctagcgcggcccccgcgcgcgtccccctgccggccggggctgagactccggggagcgcccgcgcccgcgccctcgcccccgcccccggcggcgccggcaaaactttggcactggggcacttggcagcgcggggagcccgtcggtaattttaatattttattatatatatatatctatatttttgtccaaaccaaccgcacatgcagatggggctcccgcccgtggtgttatttaaagaagaaacgtctatgtgtacagatgaatgataaactctctgcttctccctctgcccctctccaggcgccggcgggcgggccggtttcgaagttgatgcaatcggtttaaacatggctgaacgcgtgtgtacacgggactgacgcaacccacgtgtaactgtcagccgggccctgagtaatcgcttaaagatgttcctacgggcttgttgctgttgatgttttgttttgttttgttttttggtctttttttgtattataaaaaataatctatttctatgagaaaagaggcgtctgtatattttgggaatcttttccgtttcaagcattaagaacacttttaataaacttttttttgagaatggttacaaagcc

SEQ ID NO: 26 - DNA, 2653 bp, Homo sapiens
gagcgcggctggagtttgctgctgccgctgtgcagtttgttcaggggcttgtggtggtgagtccgagaggctgcgtgtgagagacgtgagaaggatcctgcactgaggaggtggaaagaagaggattgctcgaggaggcctggggtctgtgaggcagcggagctgggtgaaggctgcgggttccggcgaggcctgagctgtgctgtcgtcatgcctcaaacccgatcccaggcacaggctacaatcagttttccaaaaaggaagctgtctcgggcattgaacaaagctaaaaactccagtgatgccaaactagaaccaacaaatgtccaaaccgtaacctgttctcctcgtgtaaaagccctgcctctcagccccaggaaacgtctgggcgatgacaacctatgcaacactccccatttacctccttgttctccaccaaagcaaggcaagaaagagaatggtccccctcactcacatacacttaagggacgaagattggtatttgacaatcagctgacaattaagtctcctagcaaaagagaactagccaaagttcaccaaaacaaaatactttcttcagttagaaaaagtcaagagatcacaacaaattctgagcagagatgtccactgaagaaagaatctgcatgtgtgagactattcaagcaagaaggcacttgctaccagcaagcaaagctggtcctgaacacagctgtcccagatcggctgcctgccagggaaagggagatggatgtcatcaggaatttcttgagggaacacatctgtgggaaaaaagctggaagcctttacctttctggtgctcctggaactggaaaaactgcctgcttaagccggattctgcaagacctcaagaaggaactgaaaggctttaaaactatcatgctgaattgcatgtccttgaggactgcccaggctgtattcccagctattgctcaggagatttgtcaggaagaggtatccaggccagctgggaaggacatgatgaggaaattggaaaaacatatgactgcagagaagggccccatgattgtgttggtattggacgagatggatcaactggacagcaaaggccaggatgtattgtacacgctatttgaatggccatggctaagcaattctcacttggtgctgattggtattgctaataccctggatctcacagatagaattctacctaggcttcaagctagagaaaaatgtaagccacagctgttgaacttcccaccttataccagaaatcagatagtcactattttgcaagatcgacttaatcaggtatctagagatcaggttctggacaatgctgcagttcaattctgtgcccgcaaagtctctgctgtttcaggagatgttcgcaaagcactggatgtttgcaggagagctattgaaattgtagagtcagatgtcaaaagccagactattctcaaaccactgtctgaatgtaaatcaccttctgagcctctgattcccaagagggttggtcttattcacatatcccaagtcatctcagaagttgatggtaacaggatgaccttgagccaagaaggagcacaagattccttccctcttcagcagaagatcttggtttgctctttgatgctcttgatcaggcagttgaaaatcaaagaggtcactctggggaagttatatgaagcctacagtaaagtctgtcgcaaacagcaggtggcggctgtggaccagtcagagtgtttgtcactttcagggctcttggaagccaggggcattttaggattaaagagaaacaaggaaacccgtttgacaaaggtgtttttcaagattgaagagaaagaaatagaacatgctctgaaagataaagctttaattggaaatatcttagctactggattgccttaaattcttctcttacaccccacccgaaagtattcagctggcatttagagagctacagtcttcattttagtgctttacacattcgggcctgaaaacaaatatgaccttttttacttgaagccaatgaattttaatctatagattctttaatattagcacagaataatatctttgggtcttactatttttacccataaaagtgaccaggtagaccctttttaattacattcactacttctaccacttgtgtatctctagccaatgtgcttgcaagtgtacagatctgtgtagaggaatgtgtgtatatttacctcttcgtttgctcaaacatgagtgggtatttttttgtttgttttttttgttgttgttgtttttgaggcgcgtctcaccctgttgcccaggctggagtgcaatggcgcgttctctgctcactacagcacccgcttcccaggttgaagtgattctcttgcctcagcctcccgagtagctgggattacaggtgcccaccaccgcgcccagctaattttttaatttttagtagagacagggttttaccatgttggccaggctggtcttgaactcctgaccctcaagtgatctgcccaccttggcctccctaagtgctgggattataggcgtgagccaccatgctcagccattaaggtattttgttaagaactttaagtttagggtaagaagaatgaaaatgatccagaaaaatgcaagcaagtccacatggagatttggaggacactggttaaag

SEQ ID NO: 27 - DNA, 2266 bp, Homo sapiens
agcaaagtaatcagaacctcccaaggatggatgacaaaatttcgccggaggcccaagtggcggagctggaacttgacgccgtgatcggcttcaatggtcctgttctcctgaaactgtttttagtgaataaactaccaactcaagcaaaacaataattacattcaagcatacaaacttttctctaacatggaagcagtagtgttaccttggcagatatttggagtacgggagttgcctgtggaaagaggtgtcaccatgaaaggtcccaggctcttcagagcacctggacatgtgcccactggtctcaaatgccatcctgaccaggagcatatgatttatcctcttggttgcacagtcctcattcaggcaataaatactaaagagcagaacttcctacagggtcatggcaacaacgtctcctgcttggccatctccaggtctggagagtacatcgcctccggacaagtcacattcatggggttcaaggcagacatcattttgtgggattataagaacagagagctgcttgctcggctgtcccttcacaaaggcaaaattgaagctctggccttttctccaaatgatttgtacttggtatcactaggaggcccagatgacggaagtgtggtggtgtggagcatagccaagagagatgccatctgtggcagccctgcagccggcctcaatgttggcaatgccaccaatgtgatcttctccaggtgccgggatgagatgtttatgactgctggaaatgggacaattcgagtatgggaattggatcttccaaatagaaaaatctggccaactgagtgccaaacaggacagttgaaaagaatagtcatgagtattggagtggatgatgatgatagctttttctaccttggcaccacgactggagatattctaaaaatgaaccccaggactaaactgctgacagatgttgggcctgcgaaggacaaattcagtttgggagtgtcagctatcaggtgcctgaagatggggggtttgttggtgggctctggagccggactgctggtcttctgtaaaagccctggctacaaacccatcaagaagattcagttacaaggcggcatcacttctatcacacttcgaggagaaggacaccagtttctcgtaggaacagaagaatcgcacatttatcgtgtcagcttcacggatttcaaagagacgctcatagcgacttgtcactttgatgctgtcaaggatattgtctttccatttggcactgctgagctatttgcaacctgtgccaagaaggatatcagggtgtggcacacatcatccaacagggagctgctgcggatcaccgtgcccaacatgacctgccacggcatcgacttcatgagggacggcaaaagcatcatttcagcatggaacgacggtaaaatccgagccttcgccccagagacaggccgactgatgtatgtcattaacaatgctcacaggatcggcgtcactgccatcgccaccaccagtgactgtaaaagggtcatcagtggcggtggggaaggggaggtgagggtatggcagataggctgtcagacccagaagctggaggaggccctgaaggaacacaagtcatcagtgtcctgcattagggtgaagaggaacaacgaggagtgtgtcaccgccagcaccgatgggacttgtatcatttgggaccttgtgcgtctcaggaggaatcagatgatactagccaacaccttattccagtgtgtgtgctatcaccctgaggagttccagatcatcaccagcggaacagacagaaagattgcttactgggaagtatttgatgggacagtaatcagagaattggaaggttccctgtctgggtcgataaatggcatggatatcacacaggaaggggtgcactttgtcacaggtggaaatgaccatctggtcaaagtttgggattataatgagggtgaagtgactcacgttggggtgggacacagtggcaacatcacacgcatccgcataagtccaggaaatcaatatattgttagtgtaagtgccgatggagccattttgcgatggaagtacccatatacctcctgaagctgatgagatgtctctgagccttggcgttgcacgcagtcctgttgaagactgagtttagataactccaacactagtcttcatttctcacagctctgtttttgttcttgagtcaatttttctctttttctttatagaatgcattttatattcttaaattgcatattaaaattgaagtatgttcaag

SEQ ID NO: 28 - DNA, 2349 bp, Homo sapiens
cttctccgcctccgcctcctcccgacgccggcgccgctttctggaaggttcgtgaaggcagtgagggcttaccgttattacactgcggccggccagaatccgggtccatccgtccttcccgagccaacccagacacagcggagtttgccatgcccgagaatgtggcaccccggagcggggcgactgccggggctgccggcggccgcgggaaaggcgcctatcaggaccgcgacaagccagcccagatccgcttcagcaacatttccgccgccaaagcggttgctgatgctattagaacaagccttggaccaaaaggaatggataaaatgattcaagatggaaaaggtgatgtaaccattacaaatgatggtgctaccattctgaaacaaatgcaagtattacatccagcagccagaatgctggtggagctgtctaaggctcaagatatagaagcaggagatggcaccacatcagtagtcatcattgctggctccctcttagattcttgtaccaagcttcttcagaaagggattcatccaaccatcatttctgagtcattccagaaggccctggaaaagggcattgaaatcttgactgacatgtctcgacctgtggaactgagtgacagagaaactttgttaaatagtgcaaccacttcactgaactcaaaggtggtttctcagtattcaagtctgctttctccaatgagtgtaaatgcagtgatgaaagtgattgacccagccacagccaccagtgtagatcttagagatattaaaatagttaagaagcttggtgggacaattgatgactgtgagttggtggaagggctggttctcacccaaaaagtgtcaaattctggcataaccagagttgaaaaggccaagattgggcttattcagttttgcttatctgctcccaaaacagacatggataatcaaatagtggtttctgactatgcccagatggaccgagtgctgcgagaagagagagcctatattttaaatttagtgaagcaaattaaaaaaacaggatgtaatgtccttctcatacagaaatctattctaagagatgctcttagtgatcttgcattacactttctgaataaaatgaagatcatggtgattaaggatattgaaagagaagacattgaattcatttgtaagacaattggaaccaagccagttgctcatattgaccaatttactgctgacatgctgggttctgctgagttagctgaggaggtcaatttaaatggttctggcaaactgctcaagattacaggctgtgccagccctggaaaaacagttacaattgttgttcgtggttctaacaaactggtgattgaagaagctgagcgctccattcatgatgccctatgtgttattcgttgtttagtgaagaagagggctcttattgcaggaggtggtgctccagaaatagagttggccctacgattaactgaatattcacgaacactgagtggtatggaatcctactgcgttcgtgcttttgcagatgctatggaggtcattccatctacactagctgaaaatgccggcctgaatcccatttctacagtaacagaactaagaaaccggcatgcccagggagaaaaaactgcaggcattaatgtccgaaagggtggtatttccaacattttggaggaactggttgtccagcctctgttggtatcagtcagtgctctgactcttgcaactgaaactgttcggagcattctgaaaatagatgatgtggtaaacactcgataatctggataactgactagcaccattatgatcaccagtattgtggctggaatggaagaagatcaccttggtgttccttgtttggaagattatttcctctgaatttctgggcttggtcttccagttggcatttgcctgaagttgtattgaaacaatttaatgaaaatattaaatatttggtttcaaaaggcagatttatcttctcccaacattctgttatttctgatacttttgaaaaactaataaaaactaataaaagaagcgtaaaaagtgagtttacatgttgaggaaaaaaatggcccaatatgctcatcactgataaatgctccctggccttaaaaactaccaacatataatatatatgctgtcttaaaagttaatgatccaagtggcacctctctgaacctactttggcttgggaggctgcccagttaaaacaaaaataagttaatggtacagaaagagaatgaaaaatgaaagcctccttttatcctatcatcctaattccttttcccagtaataatgactgctgtgttggattccttctgcaaataaaagtgtatacataaaaaaaaaaaaaaaa

SEQ ID NO: 29 - DNA, 1667 bp, Homo sapiens
aagcacaggccaccactctgccctggtccacacaagctccggtagcccatggagccctggcctctcctcctgctctttagcctttgctcagctggcctcgtcctgggctccgaacatgagacccgtctggtggcaaagctatttaaagactacagcagcgtggtgcggccagtggaagaccaccgccaggtcgtggaggtcaccgtgggcctgcagctgatacagctcatcaatgtggatgaagtaaatcagatcgtgacaaccaatgtgcgtctgaaacagcaatgggtggattacaacctaaaatggaatccagatgactatggcggtgtgaaaaaaattcacattccttcagaaaagatctggcgcccagaccttgttctctataacaatgcagatggtgactttgctattgtcaagttcaccaaagtgctcctgcagtacactggccacatcacgtggacacctccagccatctttaaaagctactgtgagatcatcgtcacccactttccctttgatgaacagaactgcagcatgaagctgggcacctggacctacgacggctctgtcgtggccatcaacccggaaagcgaccagccagacctgagcaacttcatggagagcggggagtgggtgatcaaggagtcccggggctggaagcactccgtgacctattcctgctgccccgacaccccctacctggacatcacctaccacttcgtcatgcagcgcctgcccctctacttcatcgtcaacgtcatcatcccctgcctgctcttctccttcttaactggcctggtattctacctgcccacagactcaggggagaagatgactctgagcatctctgtcttactgtctttgactgtgttccttctggtcatcgtggagctgatcccctccacgtccagtgctgtgcccttgattggaaaatacatgctgttcaccatggtgttcgtcattgcctccatcatcatcactgtcatcgtcatcaacacacaccaccgctcacccagcacccatgtcatgcccaactgggtgcggaaggtttttatcgacactatcccaaatatcatgtttttctccacaatgaaaagaccatccagagaaaagcaagacaaaaagatttttacagaagacattgatatctctgacatttctggaaagccagggcctccacccatgggcttccactctcccctgatcaaacaccccgaggtgaaaagtgccatcgagggcatcaagtacatcgcagagaccatgaagtcagaccaggagtctaacaatgcggcggcagagtggaagtacgttgcaatggtgatggaccacatactcctcggagtcttcatgcttgtttgcatcatcggaaccctagccgtgtttgcaggtcgactcattgaattaaatcagcaaggatgagcagaaaatgagctgagcttagctctgccctggaacctaccagagcagagaagggcaggagaggaagatttgtctacttgctccactcgcacttatcaaacgtgttatattccatacttattattgatgataagatttacctttatgtaagtttatggccttgaagtgttttcatattgcttctccctttagttctgctgtctccctgaagagtgaaccctctttagtaaatgaaactaatcact

SEQ ID NO: 30 - DNA, 1709 bp, Homo sapiens
aggccccgcttcgcgctaacgcttgcgatggttgaattcccctcctcacgccagcctaggagaagaagttcgtagtcccagaggtgaggcaggaggcggcagtttctggcgggtgagggcggagctgaagtgacagcggaggcggaagcaacggtcggtggggcggagaagggggctggccccaggaggaggaggaaacccttccgagaaaacagcaacaagctgagctgctgtgacagaggggaacaagatggcggcgccgaaggggagcctctgggtgaggacccaactggggctcccgccgctgctgctgctgaccatggccttggccggaggttcggggaccgcttcggctgaagcatttgactcggtcttgggtgatacggcgtcttgccaccgggcctgtcagttgacctaccccttgcacacctaccctaaggaagaggagttgtacgcatgtcagagaggttgcaggctgttttcaatttgtcagtttgtggatgatggaattgacttaaatcgaactaaattggaatgtgaatctgcatgtacagaagcatattcccaatctgatgagcaatatgcttgccatcttggttgccagaatcagctgccattcgctgaactgagacaagaacaacttatgtccctgatgccaaaaatgcacctactctttcctctaactctggtgaggtcattctggagtgacatgatggactccgcacagagcttcataacctcttcatggactttttatcttcaagccgatgacggaaaaatagttatattccagtctaagccagaaatccagtacgcaccacatttggagcaggagcctacaaatttgagagaatcatctctaagcaaaatgtcctatctgcaaatgagaaattcacaagcgcacaggaattttcttgaagatggagaaagtgatggctttttaagatgcctctctcttaactctgggtggattttaactacaactcttgtcctctcggtgatggtattgctttggatttgttgtgcaactgttgctacagctgtggagcagtatgttccctctgagaagctgagtatctatggtgacttggagtttatgaatgaacaaaagctaaacagatatccagcttcttctcttgtggttgttagatctaaaactgaagatcatgaagaagcagggcctctacctacaaaagtgaatcttgctcattctgaaatttaagcatttttcttttaaaagacaagtgtaatagacatctaaaattccactcctcatagagcttttaaaatggtttcattggatataggccttaagaaatcactataaaatgcaaataaagttactcaaatctgtgaagactgtatttgctataactttattggtattgtttttgtagtaatttaagaggtggatgtttgggattgtattattattttactaatatctgtagctattttgttttttgctttggttattgtttttttcccttttcttagctatgagctgatcattgctccttctcacctcctgccatgatactgtcagttaccttagttaacaagctgaatatttagtagaaatgatgcttctgctcaggaatggcccacaaatctgtaatttgaaatttagcaggaaatgacctttaatgacactacattttcaggaactgaaatcattaaaattttatttgaataaaaaaaaaaaaaaa

SEQ ID NO: 31 - DNA, 2272 bp, Homo sapiens
aatgcacagcggtattgatgagtagatccttggattcagaggttggctgaaacgcaccatgcctgcttccatcttttgctctgtaaagttgtgaattgctcatgcctatagggaggaaggatggcacatgggattccttctcaaggcaaagttaccataacggtggatgagtacagctcaaaccccacccaggcattcacgcactacaacatcaaccagagcagattccagcctccacatgtacatatggtcgaccccatcccatatgacactccaaaaccagcgggccacacgcggtttgtctgcatctcagacacacactccagaacagatggtatccagatgccttatggggacatccttctccacacaggcgatttcaccgagctgggactgccctcagaggttaagaagtttaatgactggttaggaaacctgccatatgaatataaaatagtgattgctgggaatcatgaactgacatttgataaggaattcatggcagaccttgttaaacaggactactaccgtttcccctctgtgtccaaattgaaaccagaggactttgacaatgttcagtccctcctgacaaacagtatttacttacaagattcggaggtaacagtgaagggattcaggatatacggtgcaccttggaccccgtggtttaatggatggggctttaacctacccagaggtcagtctctgctggacaagtggaacctcatccctgagggcattgacatactcatgacacatggacctcctctaggttttcgagactgggttccaaaggagcttcaaagagtgggctgtgtggagctgttaaacacggttcagaggcgagtccggcccaagctccatgtgtttggtggaatccatgaaggttatggcatcatgaccgacggttacacaacgtacatcaatgcctcgacgtgtacagtcagctttcaaccgaccaaccctccaattatatttgaccttccaaacccacagggttcctgaagctctaaatgccctattggaatgtgagggaaggtctataaactgccatttttctaattataaacttacattctcttacttatttacaaaccctgtgagttctttttgtaaattgttggaacacaaatgatgctagaggttgtgcttcttattttattttattttaaatggggcatccatttgaaatcagaggaacattgtgaatttgtaaaatgacttctgttttctcaaaggccatgccattgtaaattgttagtgttcgccaaaggacagccaagctttcttttaaaaagtgataaaagtcttattttaatatgctttaagctgaaagaaaaaaaaataagaaacaggcagtgttttaaaaaccaacacagatttgcacaactgtttaagagtattgtttgaaatattttaattttcaatgttttgttgttgttgttttcttggtaatgcttcttttttgcagatgtggtcccaatttatagcaatcttctcaacagaagtaggcatggaaaagacttcttttcatactctcactataaagaaagctgcattgagaagaaaatggctgtcatttaaaggatggtttaactagtgagattcctattgtggttatacaaggtctcattgtttgtttgtttcttttaaattatttcagctttaaaaatacagaaatggaatctgtcaagagcaggtatttcatacggttaaaaaaatgaacatgcagactccttttcaatatgggtttatatatataagtattttttgtgtattatgactacgttaggagtttaatattgtcaaggacagtacaactgcaaagggatgctgtatagcagcacatcagaagtcggaaggaactgacacattctctcagagctcaaggtcttaaagagcttgagttaaatctaggtacagttacaggcatgtatagacttaaatggatgcaatggaagctaactaaaataaggcttagttgtcctttctatttaaataccccaagttgtcttcttacttcctctcccctctcccattttgcactgtgtgtcgatgcaatcttcgctagcacaaaatattgtcgctaatagtcatttctgttttcccattgtaaatgctgttgagctttattctattttatgttactttgttaatgaaatttaggaaagcagttgtttctttaaatttattgtgatattctatatctagcggcctttatatgcaaataaaattgcaagatttttaaaaaaaaaaaaaaaaaaaaaaaaaa

SEQ ID NO: 32 - DNA, 1947 bp, Homo sapiens
ggcccggtctggagtttgcggagggccgagccgggtgcgcacggggaggcggaggcagcggcggcggcggcggcggcggcggcggcggcggagcagatgaagaaactgaggccctgtgatgtgaagtgacttgccccccagccacacagctggaccattctggctgctgtctggacaagaagtcgtagggggtgagggtggaagctgggaaacccacaggaggcaaccacactagtttagatcttctggtgaccccacttctcgctgctcatgccgctgggactggggcggcggaaaaaggcgccccctctagtggaaaatgaggaggctgagccaggccgtggagggctgggcgtgggggagccagggcctctgggcggaggtgggtcggggggcccccaaatgggcttgcccccccctcccccagccctgcggccccgcctcgtgttccacacccagctggcccatggcagtcccactggccgcatcgagggcttcaccaacgtcaaggagctgtatggcaagatcgccgaggccttccgcctgccaactgccgaggtgatgttctgcaccctgaacacccacaaagtggacatggacaagctcctggggggccagatcgggctggaggacttcatcttcgcccacgtgaaggggcagcgcaaggaggtggaggtgttcaagtcggaggatgcactcgggctcaccatcacggacaacggggctggctacgccttcatcaagcgcatcaaggagggcagcgtgatcgaccacatccacctcatcagcgtgggcgacatgatcgaggccattaacgggcagagcctgctgggctgccggcactacgaggtggcccggctgctcaaggagctgccccgaggccgtaccttcacgctgaagctcacggagcctcgcaaggccttcgacatgatcagccagcgttcagcgggtggccgccctggctctggcccacaactgggcactggccgagggaccctgcggctccgatcccggggccccgccacggtggaggatctgccctctgcctttgaagagaaggccattgagaaggtggatgacctgctggagagttacatgggtatcagggacacggagctggcggccaccatggtggagctgggaaaggacaaaaggaacccggatgagctggccgaggccctggacgaacggctgggtgactttgccttccctgacgagttcgtctttgacgtctggggcgccattggggacgccaaggtcggccgctactaggactgcccccggaccctgcgatgatgacccgggcgcaacctggtgggggcccccagcagggacactgacgtcaggacccgagcctccagcctgagcctagctcagcagcccaaggacgatggtgaggggaggtggggccaggccccctgccccgctccaatcggtaccatcccctccctggttcccagtctggccggggtccccggcccccctgtgccctgttccccacctacctcagctgggtcaggcacagggaggggagggatcagccaaattgggcggccacccccgcctccaccactttccaccatcagctgccaaactggtccctctgtctccctggggccttgggttctgtttgggggtcatgaccttcctagtttcctgacgcagggaatacaggggagagggttgtccttccccccagcaaatgcaataatgccctcacccctcctgagaggagccccctccctgtggagcctgttacctccgcatttgacacgagtctgctgtgaaccccgcaacctcctccccacctcccatctctccttccaggcccatccctggcccagagcaggagggagggagggacgatggcggtgggtttttgtatctgaatttgctgtcttgaacataaagaatctatctgctgttggaaaaaaaaaaaaaaaaaaa

SEQ ID NO: 33 - DNA, 541 bp, Homo sapiens
agttgttgttggttgggggccttttggccggtgacggagactgcccaggtgtggtcaccatgttcctctccgcggtcttctttgccaagagcaagtcaaaaaacattctggtgagaatggtgagcgaagctgggacaggtttctgcttcaacaccaagagaaaccgactgcgggaaaaactgactcttttgcattatgatccagttgtgaaacaaagagtcctcttcgtggaaaagaaaaaaatacgctccctttaaacggtggattgaaaatgactttgatttataaagagaagactgagggcggggatactgattcagaaatcctgtagcgtgtaataaaagaagaggaaatggcatggaatcactgcctcctgtgatttgaaggccattgtgaaggaaaacaatgcagtgaaagaaagttcttcatattaggacagatatcattgcatcacatttatttatctttctgggtatttttatagcccttaataaaaaatattaaaatcgaaaaaaaaaaaaaaaaaaaaaaaaaaaaaaaa

SEQ ID NO: 34 - DNA, 2207 bp, Homo sapiens
actgacggccggccggcttcccggaactggaaggttacattgattacccacctagtacaacatcttacgggaagagcatagtatttcctagaggaatatgaacataacaggaaggtatcattggctctgaattaaatttgaacttgtcccctgaatagctacaggttttggaagctgaatcaatgttatcagatgagttagaatccaaaccagagctcctggtacagtttgttcagaatacgtccatcccattgggacaggggcttgtagaatcagaagctaaagatattacttgcttgtccctccttcccgtgactgaagcctcagaatgcagtcggctaatgttaccagatgatactacaaatcattctaactcctccaaggaggtcccttcctcagctgttttgagaagccttcgggtgaatgtgggtccagacggagaggagacgagagctcagactgtacagaaatccccggagtttttgtccacttcagagtcttctagcttgttgcaagatctacagccaagtgatagcacttcttttattcttcttaacctaacaagagcaggtctgggctcttcagctgagcacttagtgtttgtacaggatgaggcagaagattcagggaatgatttcctctccagtgagagcacagacagtagcattccatggttcctccgggttcaggagttggcccatgacagtttgattgctgctactcgtgcacaactggcaaagaatgcaaaaaccagcagcaatggagaaaatgtccaccttggttctggtgatgggcagtcaaaagattctgggccccttcctcaagtggaaaagaagctcaagtgtacagttgaaggttgtgaccggacatttgtatggccagctcactttaaataccacctcaagactcatcgaaatgaccgctccttcatctgtcctgcagaaggttgtgggaaaagcttctatgtgctgcagaggctgaaggtgcacatgaggacccacaatggagagaagccctttatgtgccatgagtctggctgtggtaagcagtttactacagctggaaacctgaagaaccaccggcgcatccacacaggagagaaacctttcctttgtgaagcccaaggatgtggccgttcctttgctgagtattctagcctccgaaaacatctggtggttcactcaggagagaagcctcatcagtgccaagtctgtgggaagaccttctctcagagtggaagcaggaatgtgcatatgagaaagcatcacctgcagctgggagcagctgggagtcaagagcaggagcaaactgctgagccactaatgggcagtagtttgcttgaagaggcttcagtacccagtaaaaacctggtgtctatgaattcccagcccagccttggtggagagtccttgaacctaccaaataccaattctatcctgggagttgatgatgaggtgcttgctgaaggatccccacgttccctgtcttcagtgcctgatgtgacacatcacctggtgaccatgcagtcagggaggcaatcatatgaagtttctgtcttaactgcagtaaatccacaagagttactaaaccaaggagatttaactgaaagacggacatgagcgtgggtgctgactcctggaagagcaactctatctgatctcaaaatgcgtatactgggaacaggatgccttagcccacaacagaaccagaatgaatctttgaaggcacaagactctgcttttgccactcttcctctttcctggtatagaagatggatgtaggagagcttcttttctaactaccatctgatcagacaaggaatgaagcaatgactgtgggctgggaaactgtacctacctctcttcccactgcaaatttctgggatagaccaaaagtgaatttgattatgtgttggctgaagttcttcattctgactgttgaggggaggttttcctttgaagagttttcatcccagactcagctgtcttttcacatggatgaaataattcctgctaccaacaacagagcttcaccaggaagttgagttttcaagatgccttgttgctttgaagaagggagtgatgtcaattctcttgttacattctccctttagcaacctgagtaagagactctctgccactgggctgcaaaaaaataaattacttgaatctccccttgaaaaaaaaaaaaaaaaaaaaaaaaaaaaa

SEQ ID NO: 35 - DNA, 3067 bp, Homo sapiens
ggtgggtttatctcaaggcctgagtagccggtaacaaacgagggttcccgggattggaccgacgcaccatgcctctgcgacttgatatcaaaagaaagctaactgctagatctgatcgagttaagagtgtggatctgcatcctacagagccatggatgttggcaagtctttacaatggcagtgtgtgtgtttggaatcatgaaacacagacactggtgaagacatttgaagtatgtgatcttcctgttcgagctgcaaagtttgttgcaaggaagaattgggttgtgacaggagcggatgacatgcagattagagtgttcaattacaatactctggagagagttcatatgtttgaagcacactcagactacattcgctgtattgctgttcatccaacccagcctttcattctaactagcagtgatgacatgcttattaagctctgggactgggataaaaaatggtcttgctcacaagtgtttgaaggacacacccattatgttatgcagattgtgatcaaccccaaagataacaatcagtttgccagtgcctctttggacaggactatcaaggtgtggcagttgggctcttcgtcaccaaacttcactttggaaggacatgagaaaggcgtgaattgcattgattactacagtggtggggacaagccatacctcatttcaggtgcagatgaccgtcttgttaaaatatgggattatcagaataaaacatgtgtgcagacactggaaggacatgcccaaaatgtgtcttgtgccagctttcatcctgagttgccaatcattatcacaggttcagaagatggaacagtacgtatttggcattcaagcacctaccggcttgagagcacactgaattatggaatggagagggtatggtgcgtggccagtctaagagggtcaaacaatgtcgctttgggctatgatgaagggagcatcattgttaagcttggtcgggaggaacctgccatgtccatggatgccaatggaaagataatttgggccaagcattcagaagtccagcaggccaacctaaaagcaatgggagatgctgaaattaaagatggtgaaagattgccactggcagtaaaggatatgggcagttgtgaaatataccctcagactattcagcacaatcctaatgggcggtttgtggtggtgtgtggtgatggggagtatatcatctacacagcaatggcattgagaaacaagagctttggatctgctcaggagtttgcatgggcccacgattcttcagagtatgcaataagagagagcaacagcattgtaaagatatttaagaactttaaggaaaaaaaatcatttaaaccagattttggagcagaaagtatctacggcggcttcttattgggagtcagatctgtaaatggcttagccttctatgactgggacaatacagaactcatacgaagaattgaaattcagcccaaacatattttctggtctgactctggagagctagtctgtattgctactgaggaatcattttttatccttaagtatctgtcagaaaaagtcttggctgcacaggaaacacatgagggagttactgaagatggcattgaagatgcctttgaggttcttggtgagattcaggaaattgtgaaaacagggctttgggtaggcgattgcttcatttacacaagttctgtgaacagattaaattattatgttggaggagaaatagtcaccattgcccacttggacaggacgatgtatctcctaggctacattcctaaagacaacaggctttatctgggggataaagaattgaacatcattagctattccctgctggtttcagtcctggaataccagacagctgtcatgcggagggactttagcatggctgataaggtccttcctaccattccaaaagaacagaggaccagagttgcacactttttggaaaagcagggcttcaagcagcaagctcttacagtatccacagatcctgagcatcgttttgagcttgctcttcagcttggagagttaaaaattgcataccagttagcagtggaagcagagtcagaacagaagtggaaacaacttgctgaacttgccattagtaaatgtcagtttggcctagcccaggagtgcctgcatcatgcacaggattatgggggcctgctgcttttggccactgcctctggaaatgctaatatggtgaacaagctagcagagggtgcggagagagatggcaaaaataatgtggcattcatgagctactttttacagggcaaggttgatgcctgcctagagctcttaattagaactggacggctgccagaagctgccttcttggcccgaacttacttacccagtcaggtttcaagggtagtgaaactctggagagagaatctctcaaaagtcaatcagaaagcagcagaatcccttgctgacccaacagagtatgaaaacctgttccctggattaaaagaagcctttgttgttgaagaatgggtgaaggaaacacatgctgatctgtggccagccaaacaatacccacttgtcacgccaaatgaagagagaaatgtcatggaagagggaaaagactttcagccctcaagatctacagctcaacaggaacttgatgggaaacctgcttctcctactccggttattgtggcctcccacacagccaacaaagaagaaaagagtttactcgaactagaagtagatttggataatttggaattagaagatattgacacaacagatatcaatctggatgaagatattttggatgattgactgtaatgctttccatttacctgactaaacagatcattattatatataggtattgattgctaccctgaccacagtgctttggactatgagaaacttcttagatttttatatgtaaatgctgtggaccactgggagcacaatgcccacatcatcttaagaagagtttatgtgcagcatttaaatcactgtgttttccttgttaactaaaacagacatgggctttgatttttttcatactattagaccatatctcataaaaccttttgaattaaaaaaaa

SEQ ID NO: 36 - DNA, 5233 bp, Homo sapiens
gatttcctgagcatgcctagggaatgacaggcatctccacaggcaggctgcatccaccttggctggggtgtcgtcattggctgcctattagaaaaacgacaggacaatgcataccaccgcctcccgactgtaaacataggggatatgtgttcacttagcatggacttctgggaggggccaaggaagggcggtctggagttttattgaatagagcagtgtgtattcggctgcctgcctgcccgcctgcttgctctctggctgtgctcctgcttaaagaaatcagtccttcctttccgacttagtcctcgggaagaagtttcagactacaaggtatcattggaacatttcaagatcatcaaatcaaattccacagggattggtgaccaaccagaaggctcagacatctgattgctgacctgtccagacatcatctggtctccctgaacctgaaatcacaccatggatgattttgagcgtcgcagagaacttagaaggcaaaagagggaggagatgcgactcgaagcagaaagaatcgcctaccagaggaatgacgatgatgaagaggaggcagcccgggaacggcgccgccgagcccgacaggaacggctgcggcagaagcaggaggaagaatccttgggacaggtgaccgaccaggtggaggtgaatgcccagaacagtgtgcctgacgaggaggccaagacaaccaccacaaacactcaagtggaaggggatgatgaggccgcattcctggagcgcctggctcggcgtgaggaaagacgccaaaaacgccttcaggaggctctggagcggcagaaggagttcgacccaacaataacagatgcaagtctgtcgctcccaagcagaagaatgcaaaatgacacagcagaaaatgaaactaccgagaaggaagaaaaaagtgaaagtcgccaagaaagatacgagatagaggaaacagaaacagtcaccaagtcctaccagaagaatgattggagggatgctgaagaaaacaagaaagaagacaaggaaaaggaggaggaggaagaggagaagccaaagcgagggagcattggagaaaatcaggtagaggtgatggtggaagagaaaacaactgaaagccaggaggaaacagtggtaatgtcattaaaaaatgggcagatcagttcagaagagcctaaacaagaggaggagagggaacaaggttcagatgagatttcccatcatgaaaagatggaagaggaagacaaggaaagagctgaggcagagagggcaaggttggaagcagaagaaagagaaagaattaaagccgagcaagacaaaaagatagcagatgaacgagcaagaattgaagcagaagaaaaagcagctgcccaagaaagagaaaggagagaggcagaagagagggaaaggatgagggaggaagagaaaagggcagcagaggagaggcagaggataaaggaggaagagaaaagggcagcagaggagaggcagaggataaaggaggaagagaaaagggcagcagaggagaggcagaggataaaagaggaagagaaaagggcagcagaggagaggcaaagggccagggcagaggaggaagagaaggctaaggtagaagagcagaaacgtaacaagcagctagaagagaaaaaacatgccatgcaagagacaaagataaaaggggaaaaggtagaacagaaaatagaagggaaatgggtaaatgaaaagaaagcacaagaagataaacttcagacagctgtcctaaagaaacagggagaagagaagggaactaaagtgcaagctaaaagagaaaagctccaagaagacaagcctaccttcaaaaaagaagagatcaaagatgaaaagattaaaaaggacaaagaacccaaagaagaagttaagagcttcatggatcgaaagaagggatttacagaagttaagtcgcagaatggagaattcatgacccacaaacttaaacatactgagaatactttcagccgccctggagggagggccagcgtggacaccaaggaggctgagggcgccccccaggtggaagccggcaaaaggctggaggagcttcgtcgtcgtcgcggggagaccgagagcgaagagttcgagaagctcaaacagaagcagcaggaggcggctttggagctggaggaactcaagaaaaagagggaggagagaaggaaggtcctggaggaggaagagcagaggaggaagcaggaggaagccgatcgaaaactcagagaggaggaagagaagaggaggctaaaggaagagattgaaaggcgaagagcagaagctgctgagaaacgccagaagatgccagaagatggcttgtcagatgacaagaaaccattcaagtgtttcactcctaaaggttcatctctcaagatagaagagcgagcagaatttttgaataagtctgtgcagaaaagcagtggtgtcaaatcgacccatcaagcagcaatagtctccaagattgacagcagactggagcagtataccagtgcaattgagggaacaaaaagcgcaaaacctacaaagccggcagcctcggatcttcctgttcctgctgaaggtgtacgcaacatcaagagtatgtgggagaaagggaatgtgttttcatcccccactgcagcaggcacaccaaataaggaaactgctggcttgaaggtaggggtttctagccgcatcaatgaatggctaactaaaaccccagatggaaacaagtcacctgctcccaaaccttctgacttgagaccaggagacgtatccagcaagcggaacctctgggaaaagcaatctgtggataaggtcacttcccccactaaggtttgagacagttccagaaagaacccaagctcaagacgcaggacgagctcagttgtagagggctaattcgctctgttttgtatttatgttgatttactaaattgggttcattatcttttatttttcaatatcccagtaaacccatgtatattatcactatatttaataatcacagtctagagatgttcatggtaaaagtactgcctttgcacaggagcctgtttctaaagaaacccatgctgtgaaatagagacttttctactgatcatcataactctgtatctgagcagtgataccaaccacatctgaagtcaacagaagatccaagtttaaaattgcctgcggaatgtgtgcagtatctagaaaaatgaaccgtagtttttgtttttttaaatacagaagtcatgttgtttctgcactttataataaagcatggaagaaattatcttagtaggcaattgtaacactttttgaaagtaacccatttcagatttgaaatactgcaataatggttgtctttaaaaaaaaaaaagaaatgtactgttaaggtattactttttttcatgctgatgattcatatctaaattacattattatgttagctgacagtggtactgattttttaggttggttgttttgtggatttctttagtagtgatagtagcctgaaccacattttagataactcaattatgtatgtatgtgcatacacatatacaaacacactaatggtagaatgcttttttatgtgctagactattatatttagtagtatgtcattgtaactagccaatatcacagcttttgaaaaattaaaaaatcacactatattaatatttcatatttgccaacagaaacatggcagataggtatcaatatgttttcaatgcctgatgacctataagaagaaagtattgaaaagaagagagattagaactgttagaaggagttgaaattttctaaaagacatagtatttagtttataattaaatgcattcttgaagtccagtgtgaattttattaatgctatcatctcgaccaagctcaaagcctacttattagaaacaatgaagttcacaataggtcataaggtctcttccttttctaaaattgaaagacaagaaatttagtgccaatattgtacagacagaaattccatgtatgagtctcaacaaagactacctttggctaaatgtctagaagcagagaagtaaagtgagcaaaatccagtgttgaggagtcatgacagtactttgatctttatatactctgaagcatttcttcaaacttttctacttttatttgtcattgatacctgtagtaagttgacaatgtggtgaaatttcaaaattatatgtaacttctactagttttactttctcccccaagtcttttttaactcatgatttttacacacacaatccagaacttattatatagcctctaagtctttattcttcacagtagataatgaaagagtcctccagtgtcttggcaaaatgttctagtatagctggatacatacagtggagttctataaactcatacctcagtggacttaaccaaaattgtgttagtctcaattcctaccacactgagggagcctcccaaataactattttcttatctgcagtattcctccagaagagctaaccagggcagggctggcatgagaagtgacatctgcgttacaaagtctatcttcctcataagtctgtaaagagcaattgaatcttctagctttagcaaacctaagccaaaggaaggaaagccacgaagaatgcagaagtcaaaccctcatgacaaagtaggcacaagtctacaataagctaaatcagaatttacaaatacaagtgtcccaggtagcattgactcccgtcattggagtgaaatggatcaaagtttgaattaaggcctatggtaaggtaacattgctttgttgtacttttgaacaagagctcctcctgatcactattacatatttttctagaaaatctaaagttcagaagagaatgtatcactgctgacttttattccaatatttggatggagtaagttttagggtagaattttgttcagtttggatttaatcttttgaaaagtaaattccttgtttactggtttgactataattctctgttatctttacgaggtaaaactgcaagctgactagcatgttctgtgaatctgccattcctaaaaattttataaacacttgatacttttcactgataatggatcgctccaataaacatatattgtgaaaatgcatccacaataaatggaattccttcctgcaaaatgtctttttctcacttatttttatgtacaatattgatagtgagaggtatgtctattataataaagattatggcacagtaaaaaaaaaaaaaaaaaa

SEQ ID NO: 37 - DNA, 6574 bp, Homo sapiens
ggtcggtgctccctgggctgctggtcttctttaccttccagctgctcacagaacagagagtttctacatacaagcagaagatgtgaaaatattgggaataaataaagtatatgcttataaacaagttgtggctgctcctggttacgttgtgcctgaccgaggaactggcagcagcgggagagaagtcttatggaaagccatgtgggggccaggactgcagtgggagctgtcagtgttttcctgagaaaggagcgagaggacgacctggaccaattggaattcaaggcccaacaggtcctcaaggattcactggctctactggtttatcgggattgaaaggagaaaggggtttcccaggccttctgggaccttatggaccaaaaggagataagggtcccatgggagttcctggctttcttggcatcaatgggattccgggccaccctggacaaccaggccccagaggcccacctggtctggatggctgtaatggaactcaaggagctgttggatttccaggccctgatggctatcctgggcttctcggaccacccgggcttcctggtcagaaaggatcaaaaggtgaccctgtccttgctccaggtagtttcaaaggaattaagggggatcctgggctgcctggactggatggaatcactggcccacaaggagcacccggatttcctggagctgtaggacctgcaggaccaccaggattacaaggtcctccagggcctcctggtcctcttggtcctgatgggaatatggggctaggttttcaaggagagaaaggagtcaagggggatgttggcctccctggcccagcaggacctccaccatctactggagagctggaattcatgggattccccaaagggaagaaaggatccaagggtgaaccagggcctaagggttttccaggcataagtggccctccaggcttcccgggccttggaactactggagaaaagggagaaaagggagaaaagggaatccctggtttgccaggacctaggggtcccatgggttcagaaggagtccaaggccctccagggcaacagggcaagaaagggaccctgggatttcctgggcttaatggattccaaggaattgagggtcaaaagggtgacattggcctgccaggcccagatgttttcatcgatatagatggtgctgtgatctcaggtaatcctggagatcctggtgtacctggcctcccaggccttaaaggagatgaaggcatccaaggcctacgtggcccttctggtgtccctggattgccagcattatcaggtgtcccaggagccctagggcctcagggatttccagggctgaagggggaccaaggaaacccaggccgtaccacaattggagcagctggcctccctggcagagatggtttgccaggcccaccaggtccaccaggcccacctagtccagaatttgagactgaaactctacacaacaaagagtcagggttccctggtctccgaggagaacaaggtccaaaaggaaacctaggcctcaaaggaataaaaggagactcaggtttctgtgcttgtgacggtggtgttcccaacactggaccacccggggaaccaggcccacctggtccatggggtctcataggccttccaggccttaaaggagccagaggagatcgaggctctgggggtgcacagggcccagcaggggctccaggcttagttgggcctctgggtccttcaggacccaaaggaaagaagggggaaccaattctcagtacaatccaaggaatgccaggagatcggggtgattctggctcccagggcttccgtggtgtaataggagaaccaggcaaggacggagtaccaggtttaccaggtctgccaggccttccgggtgatggtggacagggcttcccaggtgaaaaggggttacctggacttcctggtgaaaaaggccatcctggtccacctggcctcccaggaaatgggttaccaggacttcctggaccccgtgggcttcctggagataaaggcaaggatggattaccgggacaacaaggccttcccggatctaagggaatcaccctgccctgtattattcctgggtcatacggtccatcaggatttccaggcactcccggattcccaggccctaaagggtctcgaggcctccctgggaccccaggccagcctgggtcaagtggaagtaaaggagagccagggagtccaggattggttcatcttcctgaattaccaggatttcctggacctcgtggggagaagggcttgcctgggtttcctgggctccctggaaaagatggcttgcctgggatgattggcagtccaggcttacctggttccaagggagccactggtgacatctttggtgctgaaaatggtgctccgggggaacaaggcctacaaggattaacagggcacaaaggatttcttggagactctggccttccaggactcaagggtgtgcacgggaagcctggcttactaggccccaaaggtgagcggggcagccctgggacaccaggacaggtgggacagccaggcaccccaggatctagtggtccatatggcatcaagggcaaatctgggctcccaggagcaccaggcttcccaggcatctcaggacatcctggaaagaaaggaacaagaggcaagaaaggtcctcctggatcaattgtaaagaaagggctgccagggctaaaaggccttcctggaaatccaggcctagtaggactgaaaggaagcccaggctctccaggggtcgctgggttgccagccctctctggacccaagggagagaaggggtctgttggattcgtaggttttccaggaataccaggtctgcctggtattcctggaacaagaggattaaaaggaattccaggatcaactggaaaaatgggaccatctggacgcgctggtactcctggtgaaaagggagacagaggcaatccggggccagtcggaatacctagtccaagacgtccaatgtcaaacctttggctcaaaggagacaaaggctctcaaggctcagccggatccaatggatttcctgggccaagaggtgacaaaggagaggctggtcgacctggaccaccaggcctacctggagctcctggcctcccaggcattatcaaaggagttagtggaaagccagggccccctggcttcatgggaatccggggtttacctggcctgaaggggtcctctgggatcacaggtttcccaggaatgccaggagaaagtggttcacaaggtatcagagggtcgcctggactcccaggagcatctggtctcccaggcctgaaaggagacaacggccagacagttgaaatttccggtagcccaggacccaagggacagcctggcgaatctggttttaaaggcacaaaaggaagagatggactaataggcaatataggcttccctggaaacaaaggtgaagatggaaaagttggtgtttctggagatgttggccttcctggagctccaggatttccaggagttgccggcatgagaggagaaccaggacttccaggttcttctggtcaccaaggggcaattgggcctctaggatcccccggattaataggacccaaaggcttccctggatttcctggtttacatggactgaatgggcttccgggcaccaagggtacccatggcactccaggacctagtatcaccggtgtgcctgggcctgctggtctccctggacccaaaggagaaaaaggatatccaggaattggcatcggagctccagggaagccgggcctgagagggcaaaaaggtgatcgaggtttcccaggtctccagggccctgctggtctccccggtgccccaggcatctccttgccctcactcatagcaggacagcctggtgaccccgggcgaccaggcctagatggagaacgaggccgcccaggccccgctggacccccaggtccccctgggccatcctcgaatcaaggcgacaccggagaccctggcttccctggaattcctggacctaaagggcctaagggagaccaaggaattccaggtttttctggcctccctggagagctaggactgaaaggcatgagaggtgagcctggcttcatggggactccaggcaaggttgggccacctggagacccaggatttcccggaatgaaggggaaggcagggccaagaggctcttctggcctccaaggtgatcctggacaaacaccaactgcagaagctgtccaggttcctcctggacccttgggtctaccagggatcgatggcatccctggcctcactggggaccctggggctcaaggccctgtaggcctacaaggctccaaaggtttacctggcatccccggtaaagatggtcccagtgggctcccaggcccacctggggctcttggtgatcctggtctgcctggactgcaaggccctccaggatttgaaggagctccagggcagcaaggccccttcgggatgcctggaatgcctggccagagcatgagagtgggctacacgttggtaaagcacagccagtcggaacaggtgcccccgtgtcccatcgggatgagccagctgtgggtggggtacagcttactgtttgtggaggggcaagagaaagcccacaaccaggacctgggctttgctggctcctgtctgccccgcttcagcaccatgcccttcatctactgcaacatcaacgaggtgtgccactatgccaggcgcaatgataaatcttactggctctccactaccgcccctatccccatgatgcccgtcagccagacccagattccccagtacatcagccgctgctctgtgtgtgaggcaccctcgcaagccattgctgtgcacagccaggacatcaccatcccgcagtgccccctgggctggcgcagcctctggattgggtactctttcctcatgcacactgccgctggtgccgagggtggaggccagtccctggtctcacctggctcctgcctagaggactttcgggccactcctttcatcgaatgcagtggtgcccgaggcacctgccactactttgcaaacaagtacagtttctggttgaccacagtggaggagaggcagcagtttggggagttgcctgtgtctgaaacgctgaaagctgggcagctccacactcgagtcagtcgctgccaggtgtgtatgaaaagcctgtagggtggcacctgccactctgccccttgccctcccctgcccctcacaacagtcacctcacaaacctgaatggtctgaagaaggaaggcctgagcccctttgctgatcaagttgtacattggagtctcatttgggctagactaccggacactcgtcaccccagccctcgggtccatagagatgagcccaccctgctgagatctgctgtcctgtttctgtcaagctggtgctactgtttgatttggatgattgtgtgactattcatggctacctcagaaagatttgatgggccacaactgtcttagactgctagctttctccttaccgtcttgatcggaaagctcttcctaatcgctaatcagtcatttcttcatgtacagaggtcagcacacattatttggtttaaaccagaacccagtgtttccacacttaaattctctaaccgaatattcatggatggctcaagtctgcacagagcaagtcctcactcttcaaggaggcccacttgtgtcttaggcaggcaagagaattgaaatgagggtgccacccaagtagcccagagtgagctttagctctctctagaatgagcaagactgggccccacatggcttagagaggcttgaaggccagcagctgggttgggggtggtggtcattaatggcatatggtcctagacaaaccatctcctccttgccggctccccctccagccagagacagaggatgtggcctggttcaaagtaaagcagaggatgcaacaaatgtggccaagcctatcaaaggaaatgagaatgacagccttttttcctgggccagaagtagaggggtgggtgcgtaaggatgtgtgagttttgcttttgactccaggaacaaaaaggtaaatcccacatcccagtttctcagaagtccctgtttattccaaatgccatccagatgtgtgcaatgtggcaaactgaagctgcacagtgttggtttccttgtattctgaggatgttaaagactttgttaaatggttatccaattgctctttcacaggtagcctattaaactattttaatatgtttttttaaacctcataaaaatctagcacactcttctcttgagcagttagcagacctaaagcaagcctgaattggctatgcagtacattgtattctgtttgggggaatttgttttagccattttctttaattaccagttttccagaacactcttagctatgttgacatgaggcagttccttccaggtgattctgtttccttaagtattatataaactgtgccaatacagacaaagcataatcaatataatctgaattattgttatctttacctcctgagtaataagcatggtgtcagttttgtacatagcaaataaaataaatgaaatctg

SEQ ID NO: 38 - DNA, 3439 bp, Homo sapiens
gcgcccgcgcctcgggccgtcgggagcggagcctcctcgggaccaggacttcagggccacaggtgctgccaagatgctccagggcacctgctccgtgctcctgctctggggaatcctgggggccatccaggcccagcagcaggaggtcatctcgccggacactaccgagagaaacaacaactgcccagagaagaccgactgccccatccacgtgtacttcgtgctggacacctcggagagcgtcaccatgcagtcccccacggacatcctgctcttccacatgaagcagttcgtgccgcagttcatcagccagctgcagaacgagttctacctggaccaggtggcgctgagctggcgctacggcggcctgcacttctctgaccaggtggaggtgttcagcccaccgggcagcgaccgggcctccttcatcaagaacctgcagggcatcagctccttccgccgcggcaccttcaccgactgcgcgctggccaacatgacggagcagatccggcaggaccgcagcaagggcaccgtccacttcgccgtggtcatcaccgacggccacgtcaccggcagcccctgcgggggcatcaagctgcaggccgagcgggcccgcgaggagggcatccggctcttcgccgtggcccccaaccagaacctgaaggagcagggcctgcgggacatcgccagcacgccgcacgagctctaccgcaacgactacgccaccatgctgcccgactccaccgagatcaaccaggacaccatcaaccgcatcatcaaggtcatgaaacacgaagcctacggagagtgctacaaggtgagctgcctggaaatccctgggccctctgggcccaagggctaccgtggacagaagggtgccaagggcaacatgggtgagccgggagagcctggccagaagggaagacagggagacccgggcatcgaaggccccattggattcccaggacccaagggcgttcctggcttcaaaggagagaagggtgaatttggagccgacggtcgcaagggggcccctggcctggctggcaagaacgggaccgatggacagaagggcaagctggggcgcatcggacctcctggctgcaagggagaccctggaaaccggggccccgacggttacccgggggaagcagggagtccaggggagcgaggagaccaaggcggcaagggggaccctggccgcccaggacgcagagggcccccgggagaaatcggggccaagggaagcaaggggtatcaaggcaacaatggagccccaggaagtcctggtgtgaaaggagccaagggcgggcctgggccccgcggacccaaaggcgagccggggcgcaggggagaccccggcaccaagggcagcccaggcagcgatggccccaagggggagaagggggaccctggccctgagggcccccgcggcctggctggagaggttggcaacaaaggagccaagggagaccgaggcttgcctggacccagaggcccccagggagctcttggggagcccggaaagcagggatctcggggagaccccggtgatgcaggaccccgtggagactcaggacagccaggccccaagggagaccccggcaggcctggattcagctacccaggaccccgaggagcacccggagaaaaaggcgagcccggcccacgcggccccgagggaggccgaggcgactttggcttgaaaggagaacctgggaggaaaggagagaaaggagagcctgcggatcctggtccccctggtgagccaggccctcgggggccaagaggagtcccaggacccgagggtgagcccggcccccctggagaccccggtctcacggagtgtgacgtcatgacctacgtgagggagacctgcgggtgctgcgactgtgagaagcgctgtggcgccctggacgtggtcttcgtcatcgacagctccgagagcattgggtacaccaacttcacactggagaagaacttcgtcatcaacgtggtcaacaggctgggtgccatcgctaaggaccccaagtccgagacagggacgcgtgtgggcgtggtgcagtacagccacgagggcacctttgaggccatccagctggacgacgaacatatcgactccctgtcgagcttcaaggaggctgtcaagaacctcgagtggattgcgggcggcacctggacaccctcagccctcaagtttgcctacgaccgcctcatcaaggagagccggcgccagaagacacgtgtgtttgcggtggtcatcacggacgggcgccacgaccctcgggacgatgacctcaacttgcgggcgctgtgcgatcgcgacgtcacagtgacggccatcggcatcggggacatgttccacgagaagcacgagagtgaaaacctctactccatcgcctgcgacaagccacagcaggtgcgcaacatgacgctgttctccgacctggtcgctgagaagttcatcgatgacatggaggacgtcctctgcccggaccctcagatcgtgtgcccagaccttccctgccaaacagagctgtccgtggcacagtgcacgcagcggcccgtggacatcgtcttcctgctggacggctccgagcggctgggtgagcagaacttccacaaggcccggcgcttcgtggagcaggtggcgcggcggctgacgctggcccggagggacgacgaccctctcaacgcacgcgtggcgctgctgcagtttggtggccccggcgagcagcaggtggccttcccgctgagccacaacctcactgccatccacgaggcgctggagaccacacaatacctgaactccttctcgcacgtgggcgcaggcgtggtgcacgccatcaatgccatcgtgcgcagcccgcgtggcggggcccggaggcacgcagagctgtccttcgtgttcctcacggacggcgtcacgggcaacgacagtctgcacgagtcggcgcactccatgcgcaagcagaacgtggtacccaccgtgctggccttgggcagcgacgtggacatggacgtgctcaccacgctcagcctgggtgaccgcgccgccgtgttccacgagaaggactatgacagcctggcgcaacccggcttcttcgaccgcttcatccgctggatctgctagcgccgccgcccgggccccgcagtcgagggtcgtgagcccaccccgtccatggtgctaagcgggcccgggtcccacacggccagcaccgctgctcactcggacgacgccctgggcctgcacctctccagctcctcccacggggtccccgtagccccggcccccgcccagccccaggtctccccaggccctccgcaggctgcccggcctccctccccctgcagccatcccaaggctcctgacctacctggcccctgagctctggagcaagccctgacccaataaaggctttgaacccaaaaaaaaaaa

SEQ ID NO: 39 - DNA, 1765 bp, Homo sapiens
tcccacacccgacgctctggcccacacagacgctactctgtagcatctcaggttccctctggctgcactctggaggaccacactcgttttctttttggctgccagaggcccccgcatccaccgctgagctgggagaaagatggcggcagccgtgcgacaggatttggcccagctcatgaattcgagcggctctcataaagatctggctggcaagtatcgtcagatcctggaaaaagccattcagttatctggagcagaacaactagaagctttgaaagcttttgtggaagcaatggtaaatgagaatgtcagtctcgtgatctcgcggcagttgctgactgatttttgcacacatcttcctaacttgcctgatagcacagccaaagaaatctatcacttcaccttggaaaagatccagcctagagtcatttcatttgaggagcaggttgcttccataagacagcatcttgcatctatatatgagaaagaagaagattggagaaatgcagcccaagtgttggtgggaattcctttggaaacaggacaaaaacagtacaatgtagattataaactggagacttacttgaagattgctaggctatatctggaggatgatgatccagtccaggcagaggcttacataaatcgagcatcgttgcttcagaatgaatcaaccaatgaacaattacagatacattataaggtatgctatgcacgtgttcttgattatagaagaaaattcattgaagctgcacaaaggtacaatgagctctcttacaagacaatagtccacgaaagtgaaagactagaggccttaaaacatgctttgcactgtacgatcttagcatcagcagggcagcagcgttctcggatgctagctactctttttaaggatgaaaggtgccagcaacttgctgcctatgggatcctagagaaaatgtatctagataggatcatcagaggaaatcaacttcaagaatttgctgccatgctgatgcctcaccaaaaagcaactacagctgatggttccagcatcttggacagagctgttattgaacacaatttgttgtctgcaagcaaattatataataatattaccttcgaagaacttggagctcttttagagatccctgcagctaaggcggaaaagatagcatctcaaatgataaccgaaggacgtatgaatggatttattgaccagattgatggaatagttcattttgaaacacgagaagccctgccaacgtgggataagcagatccaatcactttgtttccaagtgaataaccttttggagaaaattagtcaaacagcaccagaatggacagcacaagccatggaagcccagatggctcagtgaatccttgcagaacttctgtgcacatgacatctttttccatgttgtgcagatcagtttcactatctccaaagcatttgcatcatgaccttatacatttcaatcccttttatgctggattccgtttaaagaagacattattagagcaggaagtacaagcatttaaaatatgtagttcccatatatttcagggtctctgtgtattaagctaactcagatgttttgaaagctttttctttaaacagaggtgaaatatctgtggctaaaaagtttgagatttgtgataactttgtagtcatgtaaaacttaagtgcttcatgcctctccaaatgtggttattctaataaatggagaaatgagccaaataaaagtagtactttgtttttagttaaaaaaaaaaaaaaaaaa

SEQ ID NO: 40 - DNA, 1508 bp, Homo sapiens
gagcgcggttaccggacgggctgggtctatggtcgctccgcggccgctccgccgcgtggtgcttttttatcagggcaagctgtgttccatggcagggaacttttggcagagctcccactatttgcaatggattttggataaacaagatctgttgaaggagcgccaaaaggatttaaagtttctctcagaggaagaatattggaagttacaaatattttttacaaatgttatccaagcattaggtgaacatcttaaattaagacaacaagttattgccactgctacggtatatttcaagagattctatgccaggtattctctgaaaagtatagatcctgtattaatggctcctacatgtgtgtttttggcatccaaagtagaggaatttggagtagtttcaaatacaagattgattgctgctgctacttctgtattaaaaactagattttcatatgcctttccaaaggaatttccttataggatgaatcatatattagaatgtgaattctatctgttagaactaatggattgttgcttgatagtgtatcatccttatagacctttgctccagtatgtgcaggacatgggccaagaagacatgttgcttccccttgcatggaggatagtgaatgatacctacagaacggatctttgcctactgtatcctcctttcatgatagctttagcttgcctacatgtagcctgtgttgtacagcagaaagatgccaggcaatggtttgctgagctttctgtggatatggaaaagattttggaaataatcagggttattttaaaactatatgagcagtggaagaatttcgatgagagaaaagagatggcaaccattcttagtaagatgccaaaaccaaaaccacctccaaacagtgaaggagagcagggtccaaatggaagtcagaactctagctacagccaatcttaaaacattccgaagaattccatagtggaccacttggaaataaaccattggacagatttcagtaatgtcttcagtggaacacaaatgaaaatgaatagcttgtttctgtcaagcatattggaaagtgattttatttttgcaaatagtttttctttaatatgattctagtacataattgattgattaaatctcttgattataaatgtttggaaaggttctaaggggacctacagacagacatacatagacatttcaaaattaatagcttttgattagtataatatttcttaatttggataataaaaattgtagctttttattaagccaggaaacatgaagcataatttgtttaaaattctctttggtcattgagggaccaaaaaaggacgtaaaatttacagtcaatctatgagggtttttttccctccataagtttaactttaaaactgtatttaaggaatcaaatcttacaaaatcctggaagattttggtaatgatgttgataatttcagggaaattaatcaagtaccgtatattgatttaaaagtgtattttattcagtagtttgagg

SEQ ID NO: 41 - DNA, 2044 bp, Homo sapiens
ccggtcggatgccggaccgggggcaccgctgaggcggtgggtccccgacctgcgagacaggtttggaagcccccgctgcgcccagtccgtgcggaccgcgaggccgcgggcgggtggaggcgcgtctccggcacgatgaaggatttgggggcagagcacttggcaggtcatgaaggggtccaacttctcgggttgttgaacgtctacctggaacaagaagagagattccaacctcgagaaaaagggctgagtttgattgaggctaccccggagaatgataacactttgtgtccaggattgagaaatgccaaagttgaagatttaaggagtttagccaacttttttggatcttgcactgaaacttttgtcctggctgtcaatattttggacaggttcttggctcttatgaaggtgaaacctaaacatttgtcttgcattggagtctgttcttttttgctggctgctagaatagttgaagaagactgcaatattccatccactcatgatgtgatccggattagtcagtgtaaatgtactgcttctgacataaaacggatggaaaaaataatttcagaaaaattgcactatgaattggaagctactactgccttaaactttttgcacttataccatactattatactttgtcatacttcagaaaggaaagaaatactgagccttgataaactagaagctcagctgaaagcttgcaactgccgactcatcttttcaaaagcaaaaccatctgtattagccttgtgccttctcaatttggaagtggaaactttgaaatctgttgaattactggaaattctcttgctagttaaaaaacattccaagattaatgacactgagttcttctactggagagagttggtttctaaatgcctagccgagtattcttctcctgaatgttgcaaaccagatcttaagaagttggtttggatcgtttcaaggcgcacagcccagaacctccacaacagctactatagtgttcctgagctgccaacgatacctgaggggggttgttttgatgaaagtgaaagtgaggactcttgtgaagatatgagttgtggagaggagagtctcagcagctctcctcccagtgatcaagagtgcaccttctttttcaacttcaaagtggcacaaacactgtgctttccatcttagaaatctgattgttctgtcagaatttatatttacagggtttcaaagcaataaatgggggaataggtagtttcctggtttagcccccatctagtcaggaattaatatactggaatacctaccttctatttgttattcagatcagatctggcctattttcatatttatcctaagccatcaaatggggtagtgcctcttaaaccattaacagtactttagacattggcactttatttttctcgtagatctttagctactttggggaggagggaaggtgctgataccttcaatttgttacttttcaagatttttaaaaataactagtgtagcttatcttaaacattttataaaaccttcagatgtctttaagcagattggaagtatgcaagtgcttccttagcagggacagtggataatccttaatggtttatcatagatttcaccctccccccttctcagaagagtgagtatgctcttaaatgtcaaacacatttttgttgttttgttttttaaatgatcagtgtctatttgatgtgatgcagatcttataaatttgggaattataatattgacatttctgtgatttttatatatgtaatgtcttaattgagatttgtgttaaggcagaaataattaggctagggctcttagttttcattcctattgccccaagtattgtcaaactatggtattattttaatgttactttaaaaatccataatctgctagttttgcatgtacttatatgaaaacagtgcagtaagttgaaaactcagtatctatggaattgataaatgttgatctggtgtagtatattttatccgcattttcttatattaaaaaatgttctgcatgattacattttatttgcctttgt

SEQ ID NO: 42 - DNA, 4266 bp, Homo sapiens
cttcctctgccaccatggggaactgggctgtgaatgaggggctctccatttttgtcattctggtttggctggggttgaacgtcttcctctttgtctggtattaccgggtttatgatattccacctaagttcttttacacaagaaaacttcttgggtcagcactggcactggccagggcccctgcagcctgcctgaatttcaactgcatgctgattctcttgccagtctgtcgaaatctgctgtccttcctcaggggttccagtgcgtgctgctcaacaagagttcgaagacaactggacaggaatctcacctttcataaaatggtggcatggatgattgcacttcactctgcgattcacaccattgcacatctatttaatgtggaatggtgtgtgaatgcccgagtcaataattctgatccttattcagtagcactctctgaacttggagacaggcaaaatgaaagttatctcaattttgctcgaaagagaataaagaaccctgaaggaggcctgtacctggctgtgaccctgttggcaggcatcactggagttgtcatcacgctgtgcctcatattaattatcacttcctccaccaaaaccatccggaggtcttactttgaagtcttttggtacacacatcatctctttgtgatcttcttcattggccttgccatccatggagctgaacgaattgtacgtgggcagaccgcagagagtttggctgtgcataatataacagtttgtgaacaaaaaatctcagaatggggaaaaataaaggaatgcccaatccctcagtttgctggaaaccctcctatgacttggaaatggatagtgggtcccatgtttctgtatctctgtgagaggttggtgcggttttggcgatctcaacagaaggtggtcatcaccaaggtggtcactcaccctttcaaaaccatcgagctacagatgaagaagaaggggttcaaaatggaagtgggacaatacatttttgtcaagtgcccaaaggtgtccaagctggagtggcacccttttacactgacatccgcccctgaggaagacttctttagtatccatatccgcatcgttggggactggacagaggggctgttcaatgcttgtggctgtgataagcaggagtttcaagatgcgtggaaactacctaagatagcggttgatgggccctttggcactgccagtgaagatgtgttcagctatgaggtggtgatgttagtgggagcagggattggggtcacacccttcgcatccattctcaagtcagtctggtacaaatattgcaataacgccaccaatctgaagctcaaaaagatctacttctactggctgtgccgggacacacatgcctttgagtggtttgcagatctgctgcaactgctggagagccagatgcaggaaaggaacaatgccggcttcctcagctacaacatctacctcactggctgggatgagtctcaggccaatcactttgctgtgcaccatgatgaggagaaagatgtgatcacaggcctgaaacaaaagactttgtatggacggcccaactgggataatgaattcaagacaattgcaagtcaacaccctaataccagaataggagttttcctctgtggacctgaagccttggctgaaaccctgagtaaacaaagcatctccaactctgagtctggccctcggggagtgcatttcattttcaacaaggaaaacttctaacttgtctcttccatgaggaaataaatgtgggttgtgctgccaaatgctcaaataatgctaattgataatataaataccccctgcttaaaaatggacaaaaagaaactataatgtaatggttttcccttaaaggaatgtcaaagattgtttgatagtgataagttacatttatgtggagctctatggttttgagagcacttttacaaacattatttcatttttttcctctcagtaatgtcagtggaagttagggaaaagattcttggactcaattttagaatcaaaagggaaaggatcaaaaggttcagtaacttccctaagattatgaaactgtgaccagatctagcccatcttactccaggtttgatactctttccacaatactgagctgcctcagaatcctcaaaatcagtttttatattccccaaaagaagaaggaaaccaaggagtagctatatatttctactttgtgtcatttttgccatcattattatcatactgaaggaaattttccagatcattaggacataatacatgttgagagtgtctcaacacttattagtgacagtattgacatctgagcatactccagtttactaatacagcagggtaactgggccagatgttctttctacagaagaatattggattgattggagttaatgtaatactcatcatttaccactgtgcttggcagagagcggatactcaagtaagttttgttaaatgaatgaatgaatttagaaccacacaatgccaagatagaattaatttaaagccttaaacaaaatttatctaaagaaataacttctattactgtcatagaccaaaggaatctgattctccctagggtcaagaacaggctaaggatactaaccaataggattgcctgaagggttctgcacattcttatttgaagcatgaaaaaagagggttggaggtggagaattaacctcctgccatgactctggctcatctagtcctgctccttgtgctataaaataaatgcagactaatttcctgcccaaagtggtcttctccagctagcccttatgaatattgaacttaggaattgtgacaaatatgtatctgatatggtcatttgttttaaataacacccaccccttattttccgtaaatacacacacaaaatggatcgcatctgtgtgactaatggtttatttgtattatatcatcatcatcatcctaaaattaacaacccagaaacaaaaatctctatacagagatcaaattcacactcaatagtatgttctgaatatatgttcaagagagagtctctaaatcactgttagtgtggccaagagcagggttttctttttgttcttagaactgctcccatttctgggaactaaaaccagttttatttgccccaccccttggagccacaaatgtttagaactcttcaacttcggtaatgaggaagaaggagaaagagctgggggaagggcagaagactggtttaggaggaaaaggaaataaggagaaaagagaatgggagagtgagagaaaataaaaaaggcaaaagggagagagaggggaagggggtctcatattggtcattccctgccccagatttcttaaagtttgatatgtatagaatataattgaaggaggtatacacatactgatgttgttttgattatctatggtattgaatcttttaaaatctggtcacaaattttgatgctgagggggattattcaagggactaggatgaactaaataagaactcagttgttctttgtcatactactattcctttcgtctcccagaatcctcagggcactgagggtaggtctgacaaataaggcctgctgtgcgaatatagcctttctgaaatgtaccaggatggtttctgcttagagacacttaggtccagcctgttcacactgcacctcaggtatcaattcatctattcaacagatatttattgtgttattactatgagtcaggctctgtttattgtttcaattctttacaccaaagtatgaactggagagggtacctcagttataaggagtctgagaatattggccctttctaacctatgtgcataattaaaaccagcttcatttgttgctccgagagtgtttctccaaggttttctatcttcaaaaccaactaagttatgaaagtagagagatctgccctgtgttatccagttatgagataaaaaatgaatataagagtgcttgtcattataaaagtttcctttttatctctcaagccaccagctgccagccaccacgagccagctgccagcctagctttttttttttttttttttttagcacttagtatttagcatttattaacaggtactctaagaatgatgaagcattgtttttaatcttaagactatgaaggtttttcttagttcttctgcttttgcaattgtgtttgtgaaatttgaatacttgcaggctttgtatgtgaataattctagcgggggacctgggagataattctacggggaattcttaaaactgtgctcaactattaaaatgaatgagctttc

SEQ ID NO: 43 - DNA, 1273 bp, Homo sapiens
caagatggcggcagctgcggcttcgcttcgcggggtagtgttgggcccgcggggcgcggggctcccgggcgcgcgtgcccggggtctgctgtgcagcgcgcggcccgggcagctcccgctacggacacctcaggcagtggccttgtcgtcgaagtctggcctttcccgaggccggaaagtgatgctgtcagcgctgggcatgctggcggcagggggtgcggggctggccgtggctctgcattcggctgtgagtgccagtgacctggagctgcacccccccagctatccgtggtctcaccgtggcctcctctcttccttggaccacaccagcatccggaggggtttccaggtatataagcaggtgtgcgcctcctgccacagcatggacttcgtggcctaccgccacctggtgggcgtgtgctacacggaggatgaagctaaggagctggctgcggaggtggaggttcaagacggccccaatgaagatggggagatgttcatgcggccagggaagctgttcgactatttcccaaaaccataccccaacagtgaggctgctcgagctgccaacaacggagcattgccccctgacctcagctacatcgtgcgagctaggcatggtggtgaggactacgtcttctccctgctcacgggctactgcgagccacccaccggggtgtcactgcgggaaggtctctacttcaacccctactttcctggccaggccattgccatggcccctcccatctacacagatgtcttagagtttgacgatggcaccccagctaccatgtcccagatagccaaggatgtgtgcaccttcctgcgctgggcatctgagccagagcacgaccatcgaaaacgcatggggctcaagatgttgatgatgatggctctgctggtgcccctggtctacaccataaagcggcacaagtggtcagtcctgaagagtcggaagctggcatatcggccgcccaagtgaccctgtccagtgtctgcttgccatcctgccagaacaggccctcaagcccaagagccatcccaggcctgttcaggcctcagctaagcctctcttcatctggaagaagaggcaagggggcaggagaccaggctctagctctgggccctccttcagcccccatcatgggaataaattaattttctcaatgtaaaaaaaaaaaaaaaaaaaaaaaaaaaaaaaaaaaaaaaaaaaaaaaaaaaaaaaaaaaaaaaaaaaaaaaaaaaaaaaaaaaaaaaaaaaaaaaaaaaaaaa

SEQ ID NO: 44 - DNA, 1817 bp, Homo sapiens
caaccatcctgaagctacaggtgctccctcctggaatctccaatggatttcagtcgcagaagcttccacagaagcctgagctcctccttgcaggcccctgtagtcagtacagtgggcatgcagcgcctcgggacgacacccagcgtttatgggggtgctggaggccggggcatccgcatctccaactccagacacacggtgaactatgggagcgatctcacaggcggcggggacctgtttgttggcaatgagaaaatggccatgcagaacctaaatgaccgtctagcgagctacctagaaaaggtgcggaccctggagcagtccaactccaaacttgaagtgcaaatcaagcagtggtacgaaaccaacgccccgagggctggtcgcgactacagtgcatattacagacaaattgaagagctgcgaagtcagattaaggatgctcaactgcaaaatgctcggtgtgtcctgcaaattgataatgctaaactggctgctgaggacttcagactgaagtatgagactgagagaggaatacgtctaacagtggaagctgatctccaaggcctgaataaggtctttgatgacctaaccctacataaaacagatttggagattcaaattgaagaactgaataaagacctagctctcctcaaaaaggagcatcaggaggaagtcgatggcctacacaagcatctgggcaacactgtcaatgtggaggttgatgctgctccaggcctgaaccttggcgtcatcatgaatgaaatgaggcagaagtatgaagtcatggcccagaagaaccttcaagaggccaaagaacagtttgagagacagactgcagttctgcagcaacaggtcacagtgaatactgaagaattaaaaggaactgaggttcaactaacggagctgagacgcacctcccagagccttgagatagaactccagtcccatctcagcatgaaagagtctttggagcacactctagaggagaccaaggcccgttacagcagccagttagccaacctccagtcgctgttgagctctctggaggcccaactgatgcagattcggagtaacatggaacgccagaacaacgaataccatatccttcttgacataaagactcgacttgaacaggaaattgctacttaccgccgccttctggaaggagaagacgtaaaaactacagaatatcagttaagcaccctggaagagagagatataaagaaaaccaggaagattaagacagtcgtgcaagaagtagtggatggcaaggtcgtgtcatctgaagtcaaagaggtggaagaaaatatctaaatagctaccagaaggagatgctgctgaggttttgaaagaaatttggctataatcttatctttgctccctgcaagaaatcagccataagaaagcactattaatactctgcagtgattagaaggggtggggtggcgggaatcctatttatcagactctgtaattgaatataaatgttttactcagaggagctgcaaattgcctgcaaaaatgaaatccagtgagcactagaatatttaaaacatcattactgccatctttatcatgaagcacatcaattacaagctgtagaccacctaatatcaatttgtaggtaatgttcctgaaaattgcaatacatttcaattatactaaacctcacaaagtagaggaatccatgtaaattgcaaataaaccactttctaattttttcctgtttctgaaaaaaaaaaaaaaaaaaaaaaaaaaaaaaaaaaaaaaaaaaaaaaaaaaaaaaaaaaaaaaaaaaaaaaaaaaaaaaaaaa

SEQ ID NO: 45 - DNA, 621 bp, Homo sapiens
ggccaggcgttagctcccgtaggagaaaatgcgggaatcctgaatgaacagtgggtcctggctgtccttggggcgttccagggcagctcccctcctggaatagaatctttctttccatcctgcatggctgagagccaggcctcctgcttggtctccacaggaggctgtggcagctgtggcatccactgtggcatctccgtcctgcccaccttcttaagaggcgagatggagcaggcccatctgcctctgccctttctagccaaagttatagctgccctggactgctcactctctggtctcaatttaaaatgatcccacggccacagggctcctgcccaggggcttgttaccttcccctcctccttcctgagtcactccttcagtagaagggcctgctctctatcctgccccacagccctgcctggatttgtatccttggcttcgtgccagttcctccaagtctatggcacctccctccctctcaaccacttgagcaaactccaagaaaacttctaccccgacaccagcaattattgccaggggcattaggctctcaaatgactatagagacccgtatcatatggagactttgtcctgtgggaaatatcctccacttgaaag

SEQ ID NO: 46 - DNA, 1944 bp, Homo sapiens
caccaccagatgggccagccagaggcagcagcagcctcttcccatggatccaccacgagcgtcccacttgagccctcggaagaagagaccccggcagacgggtgccttgatggcctcctctcctcaagacatcaaatttcaagatttggtcgtcttcattttggagaagaaaatgggaaccacccgcagagcgttcctcatggagctggcccgcaggaaagggttcagggttgaaaatgagctcagtgattctgtcacccacattgtagcagagaacaactcgggttcggatgttctggagtggcttcaagcacagaaagtacaagtcagctcacaaccagagctcctcgatgtctcctggctgatcgaatgcataggagcagggaaaccggtggaaatgacaggaaaacaccagcttgttgtgagaagagactattcagatagcaccaacccaggccccccgaagactccaccaattgctgtacaaaagatctcccagtatgcgtgtcagagaagaaccactttaaacaactgtaaccagatattcacggatgcctttgatatactggctgaaaactgtgagtttagagaaaatgaagactcctgtgtgacatttatgagagcagcttctgtattgaaatctctgccattcacaatcatcagtatgaaggacacagaaggaattccctgcctggggtccaaggtgaagggtatcatagaggagattattgaagatggagaaagttctgaagttaaagctgtgttaaatgatgaacgatatcaatccttcaaactctttacttctgtatttggagtggggctgaagacttctgagaagtggttcaggatgggtttcagaactctgagtaaagtaaggtcggacaaaagcctgaaatttacacgaatgcagaaagcaggatttctgtattatgaagaccttgtcagctgtgtgaccagggcagaagcagaggccgtcagtgtgctggttaaagaggctgtctgggcatttcttccggatgctttcgtcaccatgacaggagggttccggaggggtaagaagatggggcatgatgtagattttttaattaccagcccaggatcaacagaggatgaagagcaacttttacagaaagtgatgaacttatgggaaaagaagggattacttttatattatgaccttgtggagtcaacatttgaaaagctcaggttgcctagcaggaaggttgatgctttggatcattttcaaaagtgctttctgattttcaaattgcctcgtcaaagagtggacagtgaccagtccagctggcaggaaggaaagacctggaaggccatccgtgtggatttagttctgtgcccctacgagcgtcgtgcctttgccctgttgggatggactggctcccggcagtttgagagagacctccggcgctatgccacacatgagcggaagatgattctggataaccatgctttatatgacaagaccaagaggatattcctcaaagcagaaagtgaagaagaaatttttgcgcatctgggattggattatattgaaccgtgggaaagaaatgcctaggaaagtgttgtcaacatttttttcctattcttttcaagttaaataaattatgcttcatattagtaaaagatgccataggagagtttggggttatttaggtcttattgaaatgcagattgctactagaaataaataactttggaaacatgggaaggtgccactggtaatgggtaaggttctaataggccatgtttatgactgttgcatagaattcacaatgcatttttcaagagaaatgatgttgtcactggtggctcattcagggaagctcatcaaagcccactttgttcgcagtgtagctgaaatactgtctatctctaataaaaacaggaggaaacaaaaaaaaaaaaaaaaaaaaaaaaaaaaaaaaa

SEQ ID NO: 47 - DNA, 1921 bp, Homo sapiens
cgcgacggtctcggcggcggcggcggcggcgacagagcgagcgcggcgcgggccaccatgggggcccagctcagcacgttgggccatatggtgctcttcccagtctggttcctgtacagtctgctcatgaagctgttccagcgctccacgccagccatcaccctcgagagcccggacatcaagtacccgctgcggctcatcgaccgggagatcatcagccatgacacccggcgcttccgctttgccctgccgtcaccccagcacatcctgggcctccctgtcggccagcacatctacctctcggctcgaattgatggaaacctggtcgtccggccctatacacccatctccagcgatgatgacaagggcttcgtggacctggtcatcaaggtttacttcaaggacacccatcccaagtttcccgctggagggaagatgtctcagtacctggagagcatgcagattggagacaccattgagttccggggccccagtgggctgctggtctaccagggcaaagggaagttcgccatccgacctgacaaaaagtccaaccctatcatcaggacagtgaagtctgtgggcatgatcgcgggagggacaggcatcaccccgatgctgcaggtgatccgcgccatcatgaaggaccctgatgaccacactgtgtgccacctgctctttgccaaccagaccgagaaggacatcctgctgcgacctgagctggaggaactcaggaacaaacattctgcacgcttcaagctctggtacacgctggacagagcccctgaagcctgggactacggccagggcttcgtgaatgaggagatgatccgggaccaccttccacccccagaggaggagccgctggtgctgatgtgtggccccccacccatgatccagtacgcctgccttcccaacctggaccacgtgggccaccccacggagcgctgcttcgtcttctgagggccgggcaccggtcacacggccaccgcccccgcgcaccccacgccctgttcacgctcacccagtcacctccccacatcgcacactggggccccgggttcagcctggcctgcccgtgccctggtgaatcacctggctgagcagttcccctggagccccttcgggagcagggctgtgtcccagatgggccacggctgagccttcagagtacgtcctgcctggcacttactggtccttaccagagacgcccagccccatccctgtcctcatgacccctcgtccaccccccacacacactataaggctgagggctgccagcagccccgtctgcccaccattcccggccgtggaccatagtcgggatgtcagcagacacacatggcaggcccaaagctgcaggtcccagggcccaccccagccacgcctgtcacccccactcccgcctcagggccaggcccaggcctcaccacctgacgctgcatgagacattgacaccagaaagccctcttgggggcactgctccctaccccagggccctggccagccgggagcttggctctcctctggctagagtgggaagagggggctggccatggggccctcccagaacctcagcatttccttccagcccatccaaacactgaggcagccttggggaaccccgagctggggggttggcagcccactgcaccgcctcagggttttggggtcctgggctggggccacatccctgatggcagaactcccacaaccacatgtatttattcctctgtcctaaaccgtcccctccttccctcacccccagcacagggggattctgagcagtgcctcttgtctgagggacatatcagtgacctcgacgttgcctttagactacagttgtgttagcctcttgcgtattggctttttcagagtcatttatgagcagaaaaaaaaaaagtaaaactttgctaatatt

SEQ ID NO: 48 - DNA, 1618 bp, Homo sapiens
agagcccggggcgagtgggcctctgctcgtgggtggttctcgtggaggtcagctcccgcgtgtctccgctcgacagggtgcttgggcagagcccatcgggtaggcgcgggccatggcgcagtacaagggcaccatgcgcgaggcaggccgtgccatgcacctcctcaagaagcgcgaaaggcagcgggagcagatggaggtgctgaagcagcgcatcgccgaggagaccatcctcaagtcgcaggtggacaagaggttctcggcgcattacgacgccgtggaggccgagctgaagtccagcacggtgggcctggtgaccctgaacgacatgaaggcccggcaggaggccctggtcagggagcgcgagcggcagctggccaagcgccagcacctggaggagcagcggctgcagcaggagcggcagcgggagcaggagcagcggcgcgagcgcaagcgtaagatctcctgcctgtcctttgcactagacgacctcgatgaccaggccgacgcggccgaggccaggcgcgccggaaacctgggcaagaaccccgacgtggacaccagcttcctgccagaccgcgaccgcgaggaggaggagaaccggctccgagaggagctgcgccaagagtgggaggcgcagcgcgagaaagtgaaggacgaggagatggaggtcaccttcagctactgggacggctcgggccaccggcgcacggtgcgggtgcgcaagggcaacacggtgcagcagttcctgaagaaggcgctgcaggggctgcgcaaggacttcctggagctgcgctccgccggcgtggagcagctcatgttcatcaaggaggacctcatcctgccgcactaccacaccttctacgacttcatcatcgccagggcgaggggcaagagcgggccgctcttcagcttcgatgtgcacgatgacgtgcgcctgctcagcgacgccaccatggagaaggacgagtcgcacgcgggcaaggtggtgctgcgcagctggtacgagaagaacaagcacatcttccccgccagccgctgggaggcctatgaccccgagaagaagtgggacaagtacaccatccgctaacacccgcctgccagagcggaaaccgggggtggggggagacactcatttctaggccccatcaccagtcacttgatttcgtgaccttgatttcttcccccaaatttaataaagacagagggttctcatgattcacattggttgtgctattgctgatgttatgctttggttgcttggttggtcttttctgagtattttagtgttgccacctggatttgctgcattgctctgctgagctgtattgaaaccatgactgggcccactgtcagacagaaattagaataggaggcacattttttacctggtggttatgagcatggacttgggggccacagtgactgagtttgattcccgacacagcctcctccttgctgtgtagttttgggtaagcttattaaacccccatgcctcagtttggtcacctgtaaaaggaaataacaagagcacttactttataagattgatgtgagtattaagtgaattaatatttgtaaaacgcttagctcttaataaatgtttctgttgttatta

SEQ ID NO: 49 - DNA, 2910 bp, Homo sapiens
ccctcccccggccgctgcgtcgctcggctcgcgacgctgcagaggctccgaggcggcggcggcgactccctctttccctccctcctcctccgtccgcccgtccgtccgcgcgtctgtccgttcggcccggtccggcccgaagcatggccggcgtcagcttcagcggccaccgcctggagctgctggcggcttacgaggaggtgatccgagaggagagcgcggccgactgggctctgtacacatatgaagatggctccgatgacctcaagcttgcagcatcaggagaagggggcttgcaggagctttcgggacactttgagaaccagaaggtgatgtacggcttctgcagtgtcaaggactcccaagctgctctgccaaaatacgtgctcatcaactgggtgggcgaagatgtgcctgatgcccgcaagtgcgcttgtgccagccacgtggctaaggtggcagagttcttccagggtgtcgacgtgatcgtgaacgccagcagcgtggaagacatagacgcgggtgccatcgggcagcggctctctaacgggctggcgcgactctccagccctgtgctgcaccgactgcggctgcgagaggatgagaacgcagagcccgtgggcaccacctaccagaagacggatgcagctgtggaaatgaagcggattaaccgagagcagttctgggagcaggccaagaaggaagaagagctgcggaaggaggaggagcggaagaaggccctggatgagaggctcaggttcgagcaggagcggatggagcaggagcggcaggagcaagaggagcgcgagcggcgctaccgggagcgggagcagcagatcgaggagcacaggaggaaacagcagactttagaagcggaagaggccaagaggcggttgaaggagcagtctatctttggtgaccatcgggatgaggaggaagagacccacatgaagaagtcagagtcggaggtggaggaggcagcagctattattgcccagcggcctgacaacccaagggagttcttcaagcagcaggaaagagtcgcatcggcctctgcgggcagctgtgatgtaccctcgcccttcaaccatcgaccaggcagccacctggacagccaccggaggatggcgcccactcccatccccacgcggagcccgtctgactccagcaccgcctccacccctgtcgctgagcagatagagcgggccctggatgaggtcacctcctcgcagcctccaccactgccaccgccacccccaccagcccaagagacccaggagcccagccccatcctagacagtgaggagaccagagcagcagcccctcaggcctgggccggccccatggaggagccccctcaggcacaggcgcctccccgggggccaggcagccctgcagaggacttgatgttcatggagtctgcagagcaggctgtcctggctgctcccgtggagcctgccacagctgacgccacggagatccacgatgcagctgacaccattgaaactgacactgccactgctgacaccactgttgccaacaacgtaccccccgccgccaccagcctcattgacctatggcctggcaacggggaaggggcctccacactccagggtgagcccagggcccccacgccaccctcgggtactgaggtcaccctggcagaggtgcccctgctggatgaggtggctccggagccactgctgccagcaggcgaaggctgtgccacccttctcaactttgatgagctgcctgagccgccagccaccttctgtgacccagaggaagtggaaggggagcccctggctgccccccagaccccaactctgccctcagcccttgaggagctggagcaagagcaggagccggagccccacctgctaaccaatggcgagaccacccagaaggaggggacccaggccagtgaggggtacttcagtcaatcacaggaggaggagtttgcccaatcggaagagctctgtgccaaggctccgcctcctgtgttctacaacaagcctccagagatcgacatcacatgctgggatgcagacccagttccagaagaggaggagggcttcgagggtggtgattagcggtggcgccagccctaggctacccttgccaaggccgcccacctgcatcagcctctggccagacggcccgccgtgcctgcattcgcagcagctccgcctggcacccactccggattccggccctggctggggacttggccgcttccctacccacagggcctgacttttacagcttttctctttttttaaaaagttgataggagacttgtacagttgactggctttcctctcgttggtagttgagacgctgttgcaaattccacccctccttccctggtccagattgtagctcttagtcctccctgctcagctggccgggttggaggcctcaccctgcttggggcctggcgtggggggagctctggtgggaaaatgtcccccacctcttttcctagttttatgtttcttgggaaaatatcactttgtattctctgtccagggcttcagatattttgcacgaattttaaaacatggcaataaatggctcgtgggctctggctccctgggaccccctccccgcccttcttttgaccccttcctgtctggcccaaaggaagtagcaggcccagctggggcccctcggctaccccccgtctcctgccgggcaggtcccaggttggaggccctaggcgcggttcaggtcagggctatggatggggcccaggggctttggtggcccctccccaactccttcctctttgcttgggttcctttttcacgtttagtaactgtttttttttttttttttttttttttggaaagcacaaacttctgtaacgggtcgtgctcatgtctgttaataaagaaatccagatcc

SEQ ID NO: 50 - DNA, 1739 bp, Homo sapiens
gagacttcctgctcatctgccgctccctttgccgccgccttagcccgggacccgaacccagcctctcccctacccgaacaccggccccggctccaccgaggcccgggtcccccagcccgtctcgccgccgccatggcggaccctaaatacgccgaccttcccggcattgccaggaatgagccagatgtttatgaaactagcgacctacctgaggatgatcaagcggagttcgatgcgtttgcacaagagctggaggagctgacaagcacaagtgtggaacacatcattgtcaatcctaatgctgcctatgacaagttcaaggacaagagagtggggacaaagggacttgatttctcagatcgtattggaaaaaccaagaggacaggatatgaatctggagaatatgagatgcttggagagggtctgggagtgaaggagacaccccagcaaaagtaccagcgcctactgcatgaggtccaagagctgacaactgaagttgaaaaaatcaagacgacagtgaaggagtcagccacagaggagaagctgacccctgtgttgctggctaaacagctggcagccctgaagcagcagctggttgcttcccacctggagaagctgctgggaccagatgctgcaatcaaccttaccgaccccgatggcgccctggctaagcgcctactactgcagctggaagcaacaaagaacagcaaagggggatcagggggaaaaaccactgggacccccccagatagcagccttgtcacttatgaactacattctcggcctgagcaggacaagttctctcaagctgccaaagtcgcagaacttgaaaagcgcctgacagagctggagacagctgtacgttgtgatcaggatgctcagaatcccctttctgcaggtctacagggagcctgtctcatggagactgtagagctgttgcaagcaaaggtgagcgccctagaccttgcagttttggatcaagtggaggctcggctacagagtgtcctgggaaaggtgaacgagattgccaagcataaagcctctgtagaagatgcagatacacaaagcaaggtgcaccagctatatgaaactatacagcgctggagccccattgcctccaccctccctgagctggtgcagagacttgtcaccatcaagcagctgcacgagcaagccatgcagtttggtcagctcctgacacacttggataccacccagcagatgattgctaattccttgaaggacaataccaccctcttgacccaggtgcagacaaccatgcgtgaaaacctggccacagttgaggggaactttgccagcattgatgaacggatgaagaagctgggaaagtgagcacatttgggagctggagaacaggggttatccctacccctgtgaactctgttaacagcttacatagggtttcccctttactataactctagcatccccatcccatttgacactgggggcaagggttcttcttgcatgtggggtttatacccctcccctgatgaatacagagtggtagctaggggttggttatcatcagaaggtggtctcccctcaggcctgggggataaggacgtgggcccagccacatgccaactcatgtccaatactgctttgcctggtgtggggaaggattgggtcttgtcccccaacacagcttctgtggctgactgtaatactgtacaactgtttctgaccattaaatgctgttgtactctgaaaaaaaa

SEQ ID NO: 51 - DNA, 3163 bp, Homo sapiens
tcgtgttaagaaacaagaaaggtcagggtggctgtggttggaacctccaacaggaaggttattcttcccacggatccaaaggctgtacaagggcaaagacactacagctgcctgaagttagtgctttaggatatggagcataaagagaggaaaagatgagatccacttggataccagcaccccactccagcctcgaggaagcttttacacagtctgccatggttttacacagtttaaaactggaagacagattctgctgattttcttttaatccgatctcacaaagcagcagaatggattcaaaattaccctgaaaacgttggaagacagtcttctctctcgcctctcctccgcctctgggaacttcctgggagaaacagtgctggtggaaaacctagagatcaccaagcagactgctgccgaagttgagaaaaaggtccagggggccaaggtgactgaagtgaaaatcaacgaggcccgagagcactaccggccagcagctgccagggcctcactgctctacttcatcatgaacgacctcagcaagatccatccaatgtaccagttttctctcaaggccttcagtatcgtcttccagaaggctgtggagagggctgctcctgacgaaagcctcagggagcgggtggccaacctaatagacagcataaccttctctgtgtaccagtacaccatccgcgggctctttgagtgtgataagctgacctaccttgcccagctcacctttcagattctcctcatgaaccgagaagtcaatgcagtggagttggatttcctgcttcgatctccagtgcagacgggcaccgccagccccgtggagttcctctcccatcaggcgtggggagctgtcaaggtactttcatcaatggaagaattctctaatctggatcgggacatagagggatctgctaagagctggaaaaagtttgtggagtccgaatgtcctgagaaagagaagctcccacaggagtggaagaacaagacagccctgcagcgcctctgcatgctgagagccatgcggcccgaccggatgacctatgctttgcgagattttgttgaagagaagttaggaagcaaatacgtggtgggaagagccctagattttgcaacctcatttgaagaatcgggaccagccactcctatgtttttcatcctgtctccaggggtggacccactgaaggatgtagaaagtcaaggaagaaaacttggatacaccttcaacaatcagaactttcacaacgtgtctttggggcaaggacaggaagtggtggctgaggctgcgctggacctcgctgccaagaaaggtcactgggttattttgcagaacattcacctggtggccaagtggctcagcaccctggagaagaagctggaggagcacagtgagaacagccacccagagttcagggtcttcatgagtgcagagccagcaccctcccctgagggccacatcatcccccagggcatcctggagaactccattaagatcaccaatgagccccccacgggcatgcatgccaacctgcacaaggccctggacaacttcactcaggacactctggagatgtgttctcgggagacggagtttaagagcatcctctttgctctttgttacttccatgcggtggtggcagaaagacgaaaatttgggccccagggatggaatcgctcatacccctttaacactggagacctcactatctctgtgaatgtcctctacaacttcctggaggccaacgcaaaggtcccctatgatgatttgcgctacctgtttggagagatcatgtatggaggccatatcacagatgactgggacagaagactctgcagaacctacctgggggaattcattcgaccagaaatgttagaaggagaactgtctttggccccagggttcccactcccaggcaacatggactacaatggttatcatcagtacatcgatgctgagctgcccccagaatccccctacctctatggcctccacccgaacgcagagattggcttcctgacccaaacctcagaaaagctcttccgcactgtgctggagctgcagcctcgggacagccaggccagagacggagcgggcgccacaagagaagaaaaggtcaaggcacttctggaagaaatattggagcgggtgacagacgagtttaacatcccagaactgatggccaaagtggaggagcgcaccccttacattgtagttgccttccaggagtgtggccggatgaatatcctcaccagagagattcagcgctcactgagggagctggagctcggcttaaagggggagctgactatgaccagccacatggagaacttacagaatgccctgtacttcgatatggtgccagagtcctgggctagacgagcctacccttccacagcaggcctggcagcccggtttccagacctcctcaacagaatcaaggagctagaggcttggacgggtgactttacaatcccctccactgtgtggctgacaggcttcttcaacccccagtcgttcctgactgccatcatgcagtccacggctcgcaagaatgagtggccactggaccagatggccctgcaatgtgacatgacgaagaagaacagagaagagtttaggagtcctcctcgggaaggggcctacatccatggcctcttcatggaaggtgcctgctgggacacacaggctgggatcattacagaggcaaagctgaaggatctgacaccccctatgcctgtgatgttcatcaaggccattcctgcagataagcaggactgccgcagtgtctattcctgtcctgtgtacaagactagtcagcggggacccacctacgtgtggactttcaacctgaagactaaggaaaacccatccaagtgggttctggctggagtagccttgcttctccagatttagcatcctgcagagccaccgagaaaataaaaaagctgggcttggaggctgcctagagggacaggtgggtgaagggtcaccacagacacttagaacggtaagaaaccatgagcactcacaattctgtagaattcctctagggaacttggagaggtgtgcctaaggtgaggctgagctgaaggaatgtgggcccaggtttcttaataaaatgatttactcttcaaaaaaaaaaaaaaaaaa

SEQ ID NO: 52 - DNA, 2894 bp, Homo sapiens
ggagaccgcgtctgcttcaacttgggccgtgagctctatttctacccaggctgctgtcgtcgtgggagccaacggtccattgacctcaacaagccaattgacaagcggatctacaagggcacccagcccacctgccacgatttcaaccagttcactgctgccaccgagaccatctcgctgctggtgggcttctcagcgggtcaagtgcagtacctggatctcatcaaaaaggacaccagcaagctgttcaatgaggagcggttgatcgacaagaccaaggtgacatatctgaagtggctgcctgagtcggagagcctgttcctggcatcacacgccagtggccacctgtacctgtacaacgtcagccacccctgcgcctcggccccgccccagtacagcctgctgaagcagggcgagggcttctctgtctatgctgccaagagcaaggcaccccgcaacccgctggccaagtgggcggtgggtgagggtcccctcaacgagttcgccttctcgcccgatggccggcacctggcctgtgtgagccaggatgcgtgcctgcgcgtcttccacttcgactccatgctcctgcgtgggctcatgaagagctactttgggggcctgctgtgtgtgtgctggagccctgacggccgctacgtggtgacgggtggcgaagatgacctggtcaccgtgtggtccttcaccgagggccgcgtggtggctcgaggccatggccacaagtcctgggtcaacgctgtggcctttgactctctctacaccacaagggcagaggaggcggcgacagcagccggtgctgatggggagcggagcggcgaagaggaggaggaggagcccgaggctgcgggcacaggctcggccgggggcgccccactctctccactgcccaaggctggctccattacttaccgctttggctcggcgggccaggacacgcagttctgcctgtgggacctcactgaagacgtgctctacccgcacccgcccctggcccgcacccgcaccctccctggcacacctggcaccacgccaccggccgccagcagctcgaggggtggcgagcctggcccaggccccctgcctcgctcgctgtcccgctccaacagtctcccgcacccagctggcgggggcaaggcgggcggcccgggtgtggcggcagagcctggcacaccattcagcattggccgcttcgccacgctcacactgcaggagcggcgggaccggggggcagagaaggagcacaagcgctaccacagcctgggcaacatcagccggggtggcagtggcggcagtggcagtggtggggagaagcccagcggccctgttccccgcagccgcctggaccccgccaaggtgctgggcactgcgctgtgcccgcgcatccacgaggtgcccctgctggagccccttgtgtgcaagaagatcgcccaggagcggctcacagtcctcctgttcctggaggactgcatcatcactgcctgccaggagggcctcatctgcacctggccgcggccgggcaaggcgttcacagacgaggagaccgaggcccagacaggggaaggaagttggcccaggtcacccagcaagtcagtggtagagggcatctcctcccaaccaggcaactccccgagtggcacagtggtgtgaagccatggatatcgggcccccccaaccccatgcccccagcctcctagccataaccctccctgctgacctcacagatcaacgtattaacaagactaaccatgatggatggactgctccagtccccccacctgcacaaaatttgggggccccccagactggcccggacacgggcgatgtaatagcccttgtggcctcagccttgtcccccacccactgccaagtacaatgacctcttcctctgaaacatcagtgttaccctcatccctgtccccagcatgtgactggtcactcctggggagagactccccgcccctgccacaagagccccaggtctgcagtgtgcccctcagttgagtgggcagggcgggggtggtccagccctcgcccggcccccaccccagctgcccttgctattgtctgtgcttttgaagagtgttaaattatggaagcccctcaggttcctccctgtcccgcaggacctcttatttatactaaagttccctgttttctcagcgggtctgtccccttcggaggagatgatgtagaggacctgtgtgtgtactctgtggttctaggcagtccgctttccccagaggaggagtgcaggcctgctcccagcccagcgcctcccaccccttttcatagcaggaaaagccggagcccagggagggaacggacctgcgagtcacacaactggtgacccacaccagcggctggagcaggaccctcttggggagaagagcatcctgcccgcagccagggcccctcatcaaagtcctcggtgttttttaaattatcagaactgcccaggaccacgtttcccaggccctgcccagctgggactcctcggtccttgcctcctagtttctcaggcctggccctctcaaggcccaggcaccccaggccggttggaggccccgacttccactctggagaaccgtccaccctggaaagaagagctcagattcctcttggctctcggagccgcagggagtgtgtcttcccgcgccaccctccaccccccgaaatgtttctgtttctaatcccagcctgggcaggaatgtggctccccgccaggggccaaggagctattttggggtctcgtttgcccagggagggcttggctccaccactttcctcccccagcctttgggcagcaggtcacccctgttcaggctctgagggtgccccctcctggtcctgtcctcaccaccccttccccacctcctggg

SEQ ID NO: 53 - DNA, 14069 bp, Homo sapiens
cgttaaatgcaaacgctgctctggctcatgtgtttgctccgaggtataggttttgttcgactgacgtatcagatagtcagagtggttaccacaccgacgttgtagcagctgcataataaatgactgaaagaatcatgttaggcatgcccacctaacctaacttgaatcatgcgaaaggggagctgttggaattcaaatagactttctggttcccagcagtcggcagtaatagaatgctttcaggaagatgacagaatcaggagaaagatgctgttttgcactatcttgatttgttacagcagccaacttattggcatgatggagtgacaggaaaaacagctggcatggaagatgaaagagaagatgttcaaaagaaaacattcacaaaatgggtaaatgcacaattttctaagtttgggaagcagcatattgagaacctcttcagtgacctacaggatgggaggcgcctcctagacctcctcgaaggcctgacagggcaaaaactgccaaaagaaaaaggatccacaagagttcatgccctgaacaatgtcaacaaggcactgcgggttttgcagaacaataatgttgatttagtgaatattggaagtactgacatcgtagatggaaatcataaactgactcttggtttgatttggaatataatcctccactggcaggtcaaaaatgtaatgaaaaatatcatggctggattgcaacaaaccaacagtgaaaagattctcctgagctgggtccgacaatcaactcgtaattatccacaggttaatgtaatcaacttcaccaccagctggtctgatggcctggctttgaatgctctcatccatagtcataggccagacctatttgactggaatagtgtggtttgccagcagtcagccacacaacgactggaacatgcattcaacatcgccagatatcaattaggcatagagaaactactcgatcctgaagatgttgataccacctatccagataagaagtccatcttaatgtacatcacatcactcttccaagttttgcctcaacaagtgagcattgaagccatccaggaagtggaaatgttgccaaggccacctaaagtgactaaagaagaacattttcagttacatcatcaaatgcactattctcaacagatcacggtcagtctagcacagggatatgagagaacttcttcccctaagcctcgattcaagagctatgcctacacacaggctgcttatgtcaccacctctgaccctacacggagcccatttccttcacagcatttggaagctcctgaagacaagtcatttggcagttcattgatggagagtgaagtaaacctggaccgttatcaaacagctttagaagaagtattatcgtggcttctttctgctgaggacacattgcaagcacaaggagagatttctaatgatgtggaagtggtgaaagaccagtttcatactcatgaggggtacatgatggatttgacagcccatcagggccgggttggtaatattctacaattgggaagtaagctgattggaacaggaaaattatcagaagatgaagaaactgaagtacaagagcagatgaatctcctaaattcaagatgggaatgcctcagggtagctagcatggaaaaacaaagcaatttacatagagttttaatggatctccagaatcagaaactgaaagagttgaatgactggctaacaaaaacagaagaaagaacaaggaaaatggaggaagagcctcttggacctgatcttgaagacctaaaacgccaagtacaacaacataaggtgcttcaagaagatctagaacaagaacaagtcagggtcaattctctcactcacatggtggtggtagttgatgaatctagtggagatcacgcaactgctgctttggaagaacaacttaaggtattgggagatcgatgggcaaacatctgtagatggacagaagaccgctgggttcttttacaagacatccttctcaaatggcaacgtcttactgaagaacagtgcctttttagtgcatggctttcagaaaaagaagatgcagtgaacaagattcacacaactggctttaaagatcaaaatgaaatgttatcaagtcttcaaaaactggccgttttaaaagcggatctagaaaagaaaaagcaatccatgggcaaactgtattcactcaaacaagatcttctttcaacactgaagaataagtcagtgacccagaagacggaagcatggctggataactttgcccggtgttgggataatttagtccaaaaacttgaaaagagtacagcacagatttcacaggctgtcaccaccactcagccatcactaacacagacaactgtaatggaaacagtaactacggtgaccacaagggaacagatcctggtaaagcatgctcaagaggaacttccaccaccacctccccaaaagaagaggcagattactgtggattctgaaattaggaaaaggttggatgttgatataactgaacttcacagctggattactcgctcagaagctgtgttgcagagtcctgaatttgcaatctttcggaaggaaggcaacttctcagacttaaaagaaaaagtcaatgccatagagcgagaaaaagctgagaagttcagaaaactgcaagatgccagcagatcagctcaggccctggtggaacagatggtgaatgagggtgttaatgcagatagcatcaaacaagcctcagaacaactgaacagccggtggatcgaattctgccagttgctaagtgagagacttaactggctggagtatcagaacaacatcatcgctttctataatcagctacaacaattggagcagatgacaactactgctgaaaactggttgaaaatccaacccaccaccccatcagagccaacagcaattaaaagtcagttaaaaatttgtaaggatgaagtcaaccggctatcaggtcttcaacctcaaattgaacgattaaaaattcaaagcatagccctgaaagagaaaggacaaggacccatgttcctggatgcagactttgtggcctttacaaatcattttaagcaagtcttttctgatgtgcaggccagagagaaagagctacagacaatttttgacactttgccaccaatgcgctatcaggagaccatgagtgccatcaggacatgggtccagcagtcagaaaccaaactctccatacctcaacttagtgtcaccgactatgaaatcatggagcagagactcggggaattgcaggctttacaaagttctctgcaagagcaacaaagtggcctatactatctcagcaccactgtgaaagagatgtcgaagaaagcgccctctgaaattagccggaaatatcaatcagaatttgaagaaattgagggacgctggaagaagctctcctcccagctggttgagcattgtcaaaagctagaggagcaaatgaataaactccgaaaaattcagaatcacatacaaaccctgaagaaatggatggctgaagttgatgtttttctgaaggaggaatggcctgcccttggggattcagaaattctaaaaaagcagctgaaacagtgcagacttttagtcagtgatattcagacaattcagcccagtctaaacagtgtcaatgaaggtgggcagaagataaagaatgaagcagagccagagtttgcttcgagacttgagacagaactcaaagaacttaacactcagtgggatcacatgtgccaacaggtctatgccagaaaggaggccttgaagggaggtttggagaaaactgtaagcctccagaaagatctatcagagatgcacgaatggatgacacaagctgaagaagagtatcttgagagagattttgaatataaaactccagatgaattacagaaagcagttgaagagatgaagagagctaaagaagaggcccaacaaaaagaagcgaaagtgaaactccttactgagtctgtaaatagtgtcatagctcaagctccacctgtagcacaagaggccttaaaaaaggaacttgaaactctaaccaccaactaccagtggctctgcactaggctgaatgggaaatgcaagactttggaagaagtttgggcatgttggcatgagttattgtcatacttggagaaagcaaacaagtggctaaatgaagtagaatttaaacttaaaaccactgaaaacattcctggcggagctgaggaaatctctgaggtgctagattcacttgaaaatttgatgcgacattcagaggataacccaaatcagattcgcatattggcacagaccctaacagatggcggagtcatggatgagctaatcaatgaggaacttgagacatttaattctcgttggagggaactacatgaagaggctgtaaggaggcaaaagttgcttgaacagagcatccagtctgcccaggagactgaaaaatccttacacttaatccaggagtccctcacattcattgacaagcagttggcagcttatattgcagacaaggtggacgcagctcaaatgcctcaggaagcccagaaaatccaatctgatttgacaagtcatgagatcagtttagaagaaatgaagaaacataatcaggggaaggaggctgcccaaagagtcctgtctcagattgatgttgcacagaaaaaattacaagatgtctccatgaagtttcgattattccagaaaccagccaattttgagcagcgtctacaagaaagtaagatgattttagatgaagtgaagatgcacttgcctgcattggaaacaaagagtgtggaacaggaagtagtacagtcacagctaaatcattgtgtgaacttgtataaaagtctgagtgaagtgaagtctgaagtggaaatggtgataaagactggacgtcagattgtacagaaaaagcagacggaaaatcccaaagaacttgatgaaagagtaacagctttgaaattgcattataatgagctgggagcaaaggtaacagaaagaaagcaacagttggagaaatgcttgaaattgtcccgtaagatgcgaaaggaaatgaatgtcttgacagaatggctggcagctacagatatggaattgacaaagagatcagcagttgaaggaatgcctagtaatttggattctgaagttgcctggggaaaggctactcaaaaagagattgagaaacagaaggtgcacctgaagagtatcacagaggtaggagaggccttgaaaacagttttgggcaagaaggagacgttggtggaagataaactcagtcttctgaatagtaactggatagctgtcacctcccgagcagaagagtggttaaatcttttgttggaataccagaaacacatggaaacttttgaccagaatgtggaccacatcacaaagtggatcattcaggctgacacacttttggatgaatcagagaaaaagaaaccccagcaaaaagaagacgtgcttaagcgtttaaaggcagaactgaatgacatacgcccaaaggtggactctacacgtgaccaagcagcaaacttgatggcaaaccgcggtgaccactgcaggaaattagtagagccccaaatctcagagctcaaccatcgatttgcagccatttcacacagaattaagactggaaaggcctccattcctttgaaggaattggagcagtttaactcagatatacaaaaattgcttgaaccactggaggctgaaattcagcagggggtgaatctgaaagaggaagacttcaataaagatatgaatgaagacaatgagggtactgtaaaagaattgttgcaaagaggagacaacttacaacaaagaatcacagatgagagaaagcgagaggaaataaagataaaacagcagctgttacagacaaaacataatgctctcaaggatttgaggtctcaaagaagaaaaaaggctctagaaatttctcatcagtggtatcagtacaagaggcaggctgatgatctcctgaaatgcttggatgacattgaaaaaaaattagccagcctacctgagcccagagatgaaaggaaaataaaggaaattgatcgggaattgcagaagaagaaagaggagctgaatgcagtgcgtaggcaagctgagggcttgtctgaggatggggccgcaatggcagtggagccaactcagatccagctcagcaagcgctggcgggaaattgagagcaaatttgctcagtttcgaagactcaactttgcacaaattcacactgtccgtgaagaaacgatgatggtgatgactgaagacatgcctttggaaatttcttatgtgccttctacttatttgactgaaatcactcatgtctcacaagccctattagaagtggaacaacttctcaatgctcctgacctctgtgctaaggactttgaagatctctttaagcaagaggagtctctgaagaatataaaagatagtctacaacaaagctcaggtcggattgacattattcatagcaagaagacagcagcattgcaaagtgcaacgcctgtggaaagggtgaagctacaggaagctctctcccagcttgatttccaatgggaaaaagttaacaaaatgtacaaggaccgacaagggcgatttgacagatctgttgagaaatggcggcgttttcattatgatataaagatatttaatcagtggctaacagaagctgaacagtttctcagaaagacacaaattcctgagaattgggaacatgctaaatacaaatggtatcttaaggaactccaggatggcattgggcagcggcaaactgttgtcagaacattgaatgcaactggggaagaaataattcagcaatcctcaaaaacagatgccagtattctacaggaaaaattgggaagcctgaatctgcggtggcaggaggtctgcaaacagctgtcagacagaaaaaagaggctagaagaacaaaagaatatcttgtcagaatttcaaagagatttaaatgaatttgttttatggttggaggaagcagataacattgctagtatcccacttgaacctggaaaagagcagcaactaaaagaaaagcttgagcaagtcaagttactggtggaagagttgcccctgcgccagggaattctcaaacaattaaatgaaactggaggacccgtgcttgtaagtgctcccataagcccagaagagcaagataaacttgaaaataagctcaagcagacaaatctccagtggataaaggtttccagagctttacctgagaaacaaggagaaattgaagctcaaataaaagaccttgggcagcttgaaaaaaagcttgaagaccttgaagagcagttaaatcatctgctgctgtggttatctcctattaggaatcagttggaaatttataaccaaccaaaccaagaaggaccatttgacgttcaggaaactgaaatagcagttcaagctaaacaaccggatgtggaagagattttgtctaaagggcagcatttgtacaaggaaaaaccagccactcagccagtgaagaggaagttagaagatctgagctctgagtggaaggcggtaaaccgtttacttcaagagctgagggcaaagcagcctgacctagctcctggactgaccactattggagcctctcctactcagactgttactctggtgacacaacctgtggttactaaggaaactgccatctccaaactagaaatgccatcttccttgatgttggaggtacctgctctggcagatttcaaccgggcttggacagaacttaccgactggctttctctgcttgatcaagttataaaatcacagagggtgatggtgggtgaccttgaggatatcaacgagatgatcatcaagcagaaggcaacaatgcaggatttggaacagaggcgtccccagttggaagaactcattaccgctgcccaaaatttgaaaaacaagaccagcaatcaagaggctagaacaatcattacggatcgaattgaaagaattcagaatcagtgggatgaagtacaagaacaccttcagaaccggaggcaacagttgaatgaaatgttaaaggattcaacacaatggctggaagctaaggaagaagctgagcaggtcttaggacaggccagagccaagcttgagtcatggaaggagggtccctatacagtagatgcaatccaaaagaaaatcacagaaaccaagcagttggccaaagacctccgccagtggcagacaaatgtagatgtggcaaatgacttggccctgaaacttctccgggattattctgcagatgataccagaaaagtccacatgataacagagaatatcaatgcctcttggagaagcattcataaaagggtgagtgagcgagaggctgctttggaagaaactcatagattactgcaacagttccccctggacctggaaaagtttcttgcctggcttacagaagctgaaacaactgccaatgtcctacaggatgctacccgtaaggaaaggctcctagaagactccaagggagtaaaagagctgatgaaacaatggcaagacctccaaggtgaaattgaagctcacacagatgtttatcacaacctggatgaaaacagccaaaaaatcctgagatccctggaaggttccgatgatgcagtcctgttacaaagacgtttggataacatgaacttcaagtggagtgaacttcggaaaaagtctctcaacattaggtcccatttggaagccagttctgaccagtggaagcgtctgcacctttctctgcaggaacttctggtgtggctacagctgaaagatgatgaattaagccggcaggcacctattggaggcgactttccagcagttcagaagcagaacgatgtacatagggccttcaagagggaattgaaaactaaagaacctgtaatcatgagtactcttgagactgtacgaatatttctgacagagcagcctttggaaggactagagaaactctaccaggagcccagagagctgcctcctgaggagagagcccagaatgtcactcggcttctacgaaagcaggctgaggaggtcaatactgagtgggaaaaattgaacctgcactccgctgactggcagagaaaaatagatgagacccttgaaagactccaggaacttcaagaggccacggatgagctggacctcaagctgcgccaagctgaggtgatcaagggatcctggcagcccgtgggcgatctcctcattgactctctccaagatcacctcgagaaagtcaaggcacttcgaggagaaattgcgcctctgaaagagaacgtgagccacgtcaatgaccttgctcgccagcttaccactttgggcattcagctctcaccgtataacctcagcactctggaagacctgaacaccagatggaagcttctgcaggtggccgtcgaggaccgagtcaggcagctgcatgaagcccacagggactttggtccagcatctcagcactttctttccacgtctgtccagggtccctgggagagagccatctcgccaaacaaagtgccctactatatcaaccacgagactcaaacaacttgctgggaccatcccaaaatgacagagctctaccagtctttagctgacctgaataatgtcagattctcagcttataggactgccatgaaactccgaagactgcagaaggccctttgcttggatctcttgagcctgtcagctgcatgtgatgccttggaccagcacaacctcaagcaaaatgaccagcccatggatatcctgcagattattaattgtttgaccactatttatgaccgcctggagcaagagcacaacaatttggtcaacgtccctctctgcgtggatatgtgtctgaactggctgctgaatgtttatgatacgggacgaacagggaggatccgtgtcctgtcttttaaaactggcatcatttccctgtgtaaagcacatttggaagacaagtacagataccttttcaagcaagtggcaagttcaacaggattttgtgaccagcgcaggctgggcctccttctgcatgattctatccaaattccaagacagttgggtgaagttgcatcctttgggggcagtaacattgagccaagtgtccggagctgcttccaatttgctaataataagccagagatcgaagcggccctcttcctagactggatgagactggaaccccagtccatggtgtggctgcccgtcctgcacagagtggctgctgcagaaactgccaagcatcaggccaaatgtaacatctgcaaagagtgtccaatcattggattcaggtacaggagtctaaagcactttaattatgacatctgccaaagctgctttttttctggtcgagttgcaaaaggccataaaatgcactatcccatggtggaatattgcactccgactacatcaggagaagatgttcgagactttgccaaggtactaaaaaacaaatttcgaaccaaaaggtattttgcgaagcatccccgaatgggctacctgccagtgcagactgtcttagagggggacaacatggaaactcccgttactctgatcaacttctggccagtagattctgcgcctgcctcgtcccctcagctttcacacgatgatactcattcacgcattgaacattatgctagcaggctagcagaaatggaaaacagcaatggatcttatctaaatgatagcatctctcctaatgagagcatagatgatgaacatttgttaatccagcattactgccaaagtttgaaccaggactcccccctgagccagcctcgtagtcctgcccagatcttgatttccttagagagtgaggaaagaggggagctagagagaatcctagcagatcttgaggaagaaaacaggaatctgcaagcagaatatgaccgtctaaagcagcagcacgaacataaaggcctgtccccactgccgtcccctcctgaaatgatgcccacctctccccagagtccccgggatgctgagctcattgctgaggccaagctactgcgtcaacacaaaggccgcctggaagccaggatgcaaatcctggaagaccacaataaacagctggagtcacagttacacaggctaaggcagctgctggagcaaccccaggcagaggccaaagtgaatggcacaacggtgtcctctccttctacctctctacagaggtccgacagcagtcagcctatgctgctccgagtggttggcagtcaaacttcggactccatgggtgaggaagatcttctcagtcctccccaggacacaagcacagggttagaggaggtgatggagcaactcaacaactccttccctagttcaagaggaagaaatacccctggaaagccaatgagagaggacacaatgtaggaagtcttttccacatggcagatgatttgggcagagcgatggagtccttagtatcagtcatgacagatgaagaaggagcagaataaatgttttacaactcctgattcccgcatggtttttataatattcatacaacaaagaggattagacagtaagagtttacaagaaataaatctatatttttgtgaagggtagtggtattatactgtagatttcagtagtttctaagtctgttattgttttgttaacaatggcaggttttacacgtctatgcaattgtacaaaaaagttataagaaaactacatgtaaaatcttgatagctaaataacttgccatttctttatatggaacgcattttgggttgtttaaaaatttataacagttataaagaaagattgtaaactaaagtgtgctttataaaaaaaagttgtttataaaaacccctaaaaacaaaacaaacacacacacacacacatacacacacacacacaaaactttgaggcagcgcattgttttgcatccttttggcgtgatatccatatgaaattcatggctttttctttttttgcatattaaagataagacttcctctaccaccacaccaaatgactactacacactgctcatttgagaactgtcagctgagtggggcaggcttgagttttcatttcatatatctatatgtctataagtatataaatactatagttatatagataaagagatacgaatttctatagactgactttttccattttttaaatgttcatgtcacatcctaatagaaagaaattacttctagtcagtcatccaggcttacctgcttggtctagaatggatttttcccggagccggaagccaggaggaaactacaccacactaaaacattgtctacagctccagatgtttctcattttaaacaactttccactgacaacgaaagtaaagtaaagtattggatttttttaaagggaacatgtgaatgaatacacaggacttattatatcagagtgagtaatcggttggttggttgattgattgattgattgatacattcagcttcctgctgctagcaatgccacgatttagatttaatgatgcttcagtggaaatcaatcagaaggtattctgaccttgtgaacatcagaaggtattttttaactcccaagcagtagcaggacgatgatagggctggagggctatggattcccagcccatccctgtgaaggagtaggccactctttaagtgaaggattggatgattgttcataatacataaagttctctgtaattacaactaaattattatgccctcttctcacagtcaaaaggaactgggtggtttggtttttgttgcttttttagatttattgtcccatgtgggatgagtttttaaatgccacaagacataatttaaaataaataaactttgggaaaaggtgtaagacagtagccccatcacatttgtgatactgacaggtatcaacccagaagcccatgaactgtgtttccatcctttgcatttctctgcgagtagttccacacaggtttgtaagtaagtaagaaagaaggcaaattgattcaaatgttacaaaaaaacccttcttggtggattagacaggttaaatatataaacaaacaaacaaaaattgctcaaaaaagaggagaaaagctcaagaggaaaagctaaggactggtaggaaaaagctttactctttcatgccattttatttctttttgatttttaaatcattcattcaatagataccaccgtgtgacctataattttgcaaatctgttacctctgacatcaagtgtaattagcttttggagagtgggctgacatcaagtgtaattagcttttggagagtgggttttgtccattattaataattaattaattaacatcaaacacggcttctcatgctatttctacctcactttggttttggggtgttcctgataattgtgcacacctgagttcacagcttcaccacttgtccattgcgttattttctttttcctttataattctttctttttccttcataattttcaaaagaaaacccaaagctctaaggtaacaaattaccaaattacatgaagatttggtttttgtcttgcatttttttcctttatgtgacgctggaccttttctttacccaaggatttttaaaactcagatttaaaacaaggggttactttacatcctactaagaagtttaagtaagtaagtttcattctaaaatcagaggtaaatagagtgcataaataattttgttttaatctttttgtttttcttttagacacattagctctggagtgagtctgtcataatatttgaacaaaaattgagagctttattgctgcattttaagcataattaatttggacattatttcgtgttgtgttctttataaccaccgagtattaaactgtaaatcataatgtaactgaagcataaacatcacatggcatgttttgtcattgttttcaggtactgagttcttacttgagtatcataatatattgtgttttaacaccaacactgtaacatttacgaattatttttttaaacttcagttttactgcattttcacaacatatcagacttcaccaaatatatgccttactattgtattatagtactgctttactgtgtatctcaataaagcacgcagttatgttac

SEQ ID NO: 54 - DNA, 3872 bp, Homo sapiens
cggacgaggcacgagtgaggggggaggcggtggcggcggccattttgagccgctgccgccattggagtgggccccccccctttcccccttcgcctcctgacaggaaaggtttaagggggacagagccctgggaggccgggccgggctcgggggccaccccgggggcccgggccatggatgtgcgccgtctgaaggtgaacgaacttcgcgaggagctgcagcgccgcggcctggacactcgaggcctcaaggccgagcttgctgagcggctgcaggcggcgttggaggccgaggagcctgacgacgagcgggagctcgacgccgacgacgaaccggggcgacccgggcacatcaacgaggaggtcgagaccgaggggggctccgagctggaggggaccgcgcagccaccgccgcccgggctgcagccgcacgcggagcccggcggctactcggggccggacggacattatgccatggacaatattaccaggcagaaccaattctacgatacccaagtcatcaaacaagaaaacgagtcaggctacgagaggagaccactggaaatggagcagcagcaggcctatcgtccagaaatgaagacagagatgaagcaaggagcacccaccagcttcctcccgcctgaagcttctcaactcaagccagacaggcagcaattccagagtcgaaagaggccttatgaagaaaaccggggacgggggtactttgagcaccgagaggataggaggggccgctctcctcagcctcctgctgaagaggatgaagatgactttgatgatacccttgttgctattgacacctataactgcgacctccacttcaaggtggcccgagatcggagtagtggctatccgctcacaattgagggctttgcatacctgtggtcaggagcccgtgccagctatggggtcagaaggggccgtgtatgcttcgagatgaagatcaatgaggaaatctccgtgaagcaccttccgtctacagagcctgacccccacgtggtccgtatcggctggtccctggactcctgcagcacccagctaggcgaagagcctttctcctatggctatggaggcactgggaagaagtccaccaatagccggtttgaaaactacggagacaagtttgcagagaacgatgtgattggctgctttgcggattttgaatgtggaaatgacgtggaactgtcttttaccaagaatggaaagtggatgggcattgctttccgaatccagaaggaagccttggggggtcaggccctctatcctcatgtcctggtgaagaattgcgcagtggagttcaacttcggacagagagcagagccctactgttctgtcctcccggggtttaccttcatccagcaccttccccttagtgagcgtatccggggcaccgttggaccaaagagcaaggcagaatgtgagattctgatgatggtgggcctgcctgctgctggcaagaccacatgggccatcaaacatgcagcctccaacccttccaagaagtacaacatcctgggtaccaatgccatcatggataagatgcgggtgatgggcctacgccggcagcggaactatgctggccgctgggatgtcctgatccagcaggccacccagtgcctcaaccgcctcatccagattgctgcccgcaagaaacgcaactatatcctagatcagacaaatgtttatgggtcagcccagagacgaaaaatgagaccatttgaaggcttccagcgcaaagctattgtaatttgtcccactgacgaggacctaaaagaccgaacaataaagcgaaccgacgaggaagggaaggatgtcccagatcatgcggtcttagaaatgaaagccaacttcacgttgccagatgttggggacttcctggatgaggttctgttcattgagctgcagcgggaggaagcggacaagctagtgaggcagtacaacgaggaaggccgcaaggctgggccaccccctgaaaagcgctttgacaaccgaggtggtggtggcttccggggccgcgggggtggtggtggcttccagcgctatgaaaaccgaggaccccctggaggcaaccgtggcggcttccagaaccgagggggaggcagcggtggaggaggcaactaccgaggaggtttcaaccgcagcggaggtggtggctatagccagaaccgctggggtaacaacaaccgggataacaacaactccaacaacagaggcagctacaaccgggctccccagcaacagccgccaccacagcagcctccgccaccacagccaccaccccagcagccaccgccaccacccagctacagccctgctcggaaccccccaggggccagcacctacaataagaacagcaacatccctggctcaagcgccaataccagcacccccaccgtcagcagctacagccctccacagccgagttacagccagccaccctacaaccagggaggttacagccagggctacacagccccaccgcctccacctccaccaccacctgcctacaactatgggagctacggcggttacaacccggccccctataccccaccgccaccccccactgcacagacctaccctcagcccagctataaccagtatcagcagtatgcccagcagtggaaccagtactatcagaaccagggccagtggccgccatactacgggaactacgactacgggagctactccgggaacacacagggtggcacaagtacacagtagccagtgtgacccagaggctcccggaggcccctgccggcttcctccaccagcgcctgcctcggcccctcctctgcccccgccagatcccgtggtgctggggatggggtcatcccagggctgcctccctccagcccactgcctcccctctgaggggcttccttcccctccatagggccaggcatttttttctggattcaaacaggcaacaatgaccttttattttctgtttgtccccacctccccagccttccacctcctgttcttcctaccttcttcctttttgactaaataatccccacctcccttgatcatacagtgaggctacagtgactgaggggagaatcccctcctgttcactctcccaaccctgctccagcccctcagcttcccagaccctcatgcagttggttgtaaattctcccaggagctgttttactgtctacttttcaggattaaaaaaaaaatcaaaacttaaaaaaaaaaaagtttaaaaagcaaaatggggagggggaggaagcagtgacttttttttggtaattatgcgcttttttttaatttttagaatttgtctttttactgtgggtgggctgttgatatttcatcaagataagcatttctttcctgagttcaggtgactgaggaagagccacaaaacaaaacacaacaaaaccaaaccacagaatcatctttaacccaactttttatacgatgccccagttccccataactttgcacacaagcttctgtgttcagttgaattgtaactgctttttgtatttggagagagtgactattgaacttgaaaccttttattccgggcgtcttggtagtttctggtgggattcagtgggtgagagggaagaaggggaggttggggggctccttcccttcagaacttgaagtttctcccactgcctcctctccagtggtctcccaggtgccagacccaaaagcttttcctacagtgataccctttatttttacttccccttgactcatatgttttaacatgattttaacaaactgcacttattaagaaatgtgtttgccctgttttgtttggtttcgttttgttttctttgaataaatgacatggcacctcctagcaggaaggaagcagggttgaaa

SEQ ID NO: 55 - DNA, 1407 bp, Homo sapiens
atggcggcggaaggctggatttggcgttggggctggggccggcggtgcctgggaaggcctgggcttctcggccccggccctggccccactacacctctctttcttcttttgttgttggggtctgtgactgcggatataactgacggcaacagtgaacatctcaagcgggagcattcgctcattaagccctaccaaggggtcggttccagctctatgcccctctgggacttccagggcagcactatgctcacgagccagtacgtacgtctgacccctgacgagcgcagcaaagagggctctatctggaaccaccagccgtgcttcctcaaagactgggaaatgcacgtccacttcaaagtccacggcacagggaagaagaacctccatggagacggcatcgccttgtggtacacccgggaccgcctcgtgccagggcctgtgtttggaagcaaagataacttccacggcttagccatcttcctggacacctaccccaatgatgagaccactgagcgcgtgttcccgtacatctcggtgatggtgaacaatggctccctgtcctacgaccacagcaaggatgggcgctggaccgagctggcgggctgcacggctgacttccgcaaccgcgatcacgacaccttcctggctgtgcgctactcccggggccgtctgacggtgatgaccgacctggaggacaagaacgagtggaagaactgcattgacatcacgggagtgcgcctgcccaccggctactacttcggggcctccgccggcaccggcgacctgtctgacaatcatgacatcatctccatgaagctgttccagctgatggtggagcacacgcccgacgaggagagcatcgactggaccaagatcgagcccagcgtcaacttcctcaagtcgcccaaagacaacgtggacgaccccacggggaacttccgcagcgggcccctgacggggtggcgggtgttcctgctgctgctgtgcgctctcctgggcatcgttgtctgcgccgtggtgggggccgtggtgttccagaagcggcaggagcggaacaagcgcttctactgagtggcgcctccggcggggcctgtccctgggcccaggagccaatgtgaacttttttttttaccgggattataaaagaacaacaagatgaccttatttcttaactgtttcaaataaatgattaaagtattttcatacattttgcttcttgcccagcagggacaggtggcagagccgaggcttagggtctggcaccccccacagctggagacggaggctctcctggggctggtgtctcaggagcaggggtctgtgtctacagatgggctgtggcccctgcaggcagctgttgaacactggagggtcccccggaccacactggggtgggctcctgaggac

SEQ ID NO: 56 - DNA, 1208 bp, Homo sapiens
aaagcgagagtgagtgggaccggaggggcggggcatcatatgggcggggctgaggcgaggccccggcggccatcttgagccccgccttttacttcggcccgcttcttctggtcactccgccaccgtagaatcgcctaccatttggtgcaagcaaaaagcaatcagcaattggacaggaaaagaatggcattgaagcagatttccagcaacaagtgctttgggggattgcagaaagtttttgaacatgacagtgttgaactaaactgcaaaatgaaatttgctgtctacttaccaccaaaggcagaaacaggaaagtgccctgcactgtattggctctcaggtttaacttgcacagagcaaaattttatatcaaaatctggttatcatcagtctgcttcagaacatggtcttgttgtcattgctccagataccagccctcgtggctgcaatattaaaggtgaagatgagagctgggactttggcactggtgctggattttatgttgatgccactgaagatccttggaaaaccaactacagaatgtactcttatgtcacagaggagcttccccaactcataaatgccaattttccagtggatccccaaaggatgtctatttttggccactccatgggaggtcatggagctctgatctgtgctttgaaaaatcctggaaaatacaaatctgtgtcagcatttgctccaatttgcaaccctgtactctgtccctggggcaaaaaagcctttagtggatatttgggaacagatcaaagtaaatggaaggcttatgatgctacccaccttgtgaaatcctatccaggatctcagctggacatactaattgatcaagggaaagatgaccagtttcttttagatggacagttactccctgataacttcatagctgcctgtacagaaaagaaaatccccgttgtttttcgattgcaagagggttatgatcatagctactacttcattgcaacctttattactgaccacatcagacatcatgctaaatacctgaatgcatgaaaaaactccaaataagagaatctcttcaggattataaaagttgtaaaatgcaactgtattgctgagcaaaaaaaaaaaaaattcaaaacattggattttatagtgctaaaagggctttattctatagttgaatcacctctgaataaagatataaaacctaaaaaaaaaaaaaaaaa

SEQ ID NO: 57 - DNA, 3359 bp, Homo sapiens
gtcgaggtgctcatagtggagccctggctcccgggcggacggagccgcacggtagtagatgggggtgtggccgtggcccccgactctgctcggcggggccgttcctgctttgccatccgtgtgggacttccacgacagtggaggcacgagagctgggccccatatgctgcttgcccagcttgggaaagaggaggctgctgcaaaggaccgatcggcggcttcgggctgccggctcactcggctgctgcgtctggtctggcgtctgctgagaagatcctcttctaccctgctctgcacctgtgctcgactgccagccggctgagggcgggggtctccacggtggtcccagctcccaaggaggttgcagaagtaccgtacagagtggatttgcagggcagtggcatggagcccctcttccccgcgccgttctgggaggttatctacggcagccaccttcagggcaacctgtccctcctgagccccaaccacagtctgctgcccccgcatctgctgctcaatgccagccacggcgccttcctgcccctcgggctcaaggtcaccatcgtggggctctacctggccgtgtgtgtcggagggctcctggggaactgccttgtcatgtacgtcatcctcaggcacaccaaaatgaagacagccaccaatatttacatctttaacctggccctggccgacactctggtcctgctgacgctgcccttccagggcacggacatcctcctgggcttctggccgtttgggaatgcgctgtgcaagacagtcattgccattgactactacaacatgttcaccagcaccttcaccctaactgccatgagtgtggatcgctatgtagccatctgccaccccatccgtgccctcgacgtccgcacgtccagcaaagcccaggctgtcaatgtggccatctgggccctggcctctgttgtcggtgttcccgttgccatcatgggctcggcacaggtcgaggatgaagagatcgagtgcctggtggagatccctacccctcaggattactggggcccggtgtttgccatctgcatcttcctcttctccttcatcgtccccgtgctcgtcatctctgtctgctacagcctcatgatccggcggctccgtggagtccgcctgctctcgggctcccgagagaaggaccggaacctgcggcgcatcactcggctggtgctggtggtagtggctgtgttcgtgggctgctggacgcctgtccaggtcttcgtgctggcccaagggctgggggttcagccgagcagcgagactgccgtggccattctgcgcttctgcacggccctgggctacgtcaacagctgcctcaaccccatcctctacgccttcctggatgagaacttcaaggcctgcttccgcaagttctgctgtgcatctgccctgcgccgggacgtgcaggtgtctgaccgcgtgcgcagcattgccaaggacgtggccctggcctgcaagacctctgagacggtaccgcggcccgcatgactaggcgtggacctgcccatggtgcctgtcagcccgcagagcccatctacgcccaacacagagctcacacaggtcactgctctctaggcggacacaccctgggccctgagcatccagagcctgggatgggcttttccctgtgggccagggatgctcggtcccagaggaggacctagtgacatcatgggacaggtcaaagcattagggccacctccatggccccagacagactaaagctgccctcctggtgcagggccgaggggacacaaggacctacctggaagcagctgacatgctggtggacggccgtgactggagcccgtgcccctccctccccgtgcttcatgtgactcttggcctctctgctgctgcgttggcagaaccctgggtgggcaggcacccggaggaggagcagcagctgtgtcatcctgtgccccccatgtgctgtgtgctgtttgcatggcagggctccagctgccttcagccctgtgacgtctcctcagggcagctggacaggcttggcactgcccgggaagtgcagcaggcagcttttctttggggtgggacttgccctgagcttggagctgccacctggaggacttgcctgttccgactccacctgtgcagccggggccaccccaggagaaagtgtccaggtgggggctggcagtccctggctgcagaccccgagctggccctgggccagccgcacctctgaaggttttctgtgtgctgcacggtgcaggcctcatccctgactgcagcttgactctgggcccaacccccatttcccttcaggagaccagcgagaggccctggcccattccctccagcggtgcaatgaactatcatgctgtggaccgtcaacccagccctgcttctcagtgtggggcaggtgtctcaggacgaaggcgccgcgtgaccacatgggcagctctgttcacaaagtggaggcctcgttttcctggtcttgactgctctgtttgggtgggagaagattctctgggggtccccacatcctcccaaggctcccctcacagcctctcctttgcttgaagccagaggtcagtggccgtgctgtgttgcgggggaagctgtgtggaaggagaagctggtggccacagcagagtcctgctctggggacgcctgcttcatttacaagcctcaagatggctctgtgtagggcctgagcttgctgcccaacgggaggatggcttcacagcagagccagcatgaggggtggggcctggcagggcttgcttgagccaaactgcaaaggctgtggtggctgtgaggacactgcgggggttggggggggggcgtctgtacctcaggggatgccccgctgtggtcacccagagaatcacccttcctggtctacagatggaagctgcaggttggtgactttgcaaatgcacttcctacagatgaactattaaaagacctgcaacattgaaaaaactcattttttccaccaaaaccttggccaggtaacctaccttaggcacctgcaaagaacaggaagtgatggctgtctcgcaacagagcctgggctgctcctcctgctctggggagtctaggccgtggggactgttctggggaggctcatgctgtctccatgacgtctgtggcaggagtccctgaggacgggagctgcctagctacagttttcttgccaaggcgaggtgttttgtgaatctgtgctgatgtaatgtgcaccttcacgtatttatgcatgtggcaagcgttacttcctgtgcacgtagccagccctgggtctgtctctggggtaatgaaaaaggaccctaataaacacctgctcactggctgggtattcttcgtaa

SEQ ID NO: 58 - DNA, 1522 bp, Homo sapiens
caggtgtggattccgccggtgaaggctgaaggcagctaccttaaagatgccgggatccgcagcgaagggctcggagttgtcagagaggatcgagagcttcgtggagaccctgaagcggggtggtgggccgcgcagctccgaggaaatggctcgggagaccctagggttgctgcgccagatcatcacggaccaccgctggagcaacgcgggggagctgatggagctgatccgcagagagggcaggaggatgacggccgctcagccctccgagaccaccgtgggcaacatggtgcggagagtgctcaagattatccgggaggagtatggcagactccatggacgcagcgacgagagtgatcagcaggagtccctgcacaaactgttgacatccggaggcctaaacgaggatttcagcttccattatgcccaactccagtccaacatcattgaggcgattaatgagctgctagtggagctggaagggacaatggagaacattgcagcccaggctctggagcacattcactccaatgaggtgatcatgaccattggcttctcccgaacagtagaggccttcctcaaagaggctgcccgaaagaggaaattccatgtcattgtagcagagtgtgctcctttctgccagggtcatgaaatggctgtgaatttgtccaaagcaggtattgagacaactgtcatgactgatgctgccatttttgccgttatgtcaagagtcaacaaggtgatcattggcacgaagaccatcctggccaatggggccctgagagctgtgacaggaactcacactctggcactggcagcaaaacaccattccaccccactcatcgtctgtgcacctatgttcaaactttctccacagttccccaatgaagaagactcatttcataagtttgtggctcctgaagaagtcctgccattcacagaaggggacattctggagaaggtcagcgtgcattgccctgtgtttgactacgttcccccagagctcattaccctctttatctccaacattggtgggaatgcaccttcctacatctaccgcctgatgagtgaactctaccatcctgatgatcatgttttatgaccgaccacacgtgtcctaagcagattgcttaggcagatacagaatgaagaggagacttgagtgttgctgctgaagcacatccttgcaatgtgggagtgcacaggagtccacctaaaaaaaaaatccttgatactgttgcctgcctttttagtcaccccgtaacaagggcacacatccagcactgtgtcttgcctttcagatcttaacagagcagcagggcttaacttgttgattttggagcctcttagtgacctggttgcgtctgtgtcaggaacttaaactttctggttcagtagtgtgttaaacataacactgaataccttactgggatacagatttttgctcagaaatggctatgacactttttctaggctctaccaataaaagccacttgaaggttcaaaaaaaaaaaaaaaaaaa

SEQ ID NO: 59 - DNA, 2169 bp, Homo sapiens
gagcttcgattgcgcggccgccaagtttcagtgatgaacgccctctttgggcgtccccggataccgcctgacgtagtgccaatcacacctctcgcgtctcggcgcctcggaggctaatgaggacgcctggcgaaacgcagtaacggatttccgggtggaccttcgctttacggctcgtgagttcttccgcccaacccagaggaagcgggagagcagtttacgacagcgccggtcgtgtttacggcggcgcccgctgcgcgcgcatgtttcctcttttcctggtttctcaagagtgctgctgctaacgcggtccccggcacgcaccatctgttgccatcccggccggccgaggccattgcagattttggaagatggcaaagttcatgacacccgtgatccaggacaacccctcaggctggggtccctgtgcggttcccgagcagtttcgggatatgccctaccagccgttcagcaaaggagatcggctaggaaaggttgcagactggacaggagccacataccaagataagaggtacacaaataagtactcctctcagtttggtggtggaagtcaatatgcttatttccatgaggaggatgaaagtagcttccagctggtggatacagcgcgcacacagaagacggcctaccagcggaatcgaatgagatttgcccagaggaacctccgcagagacaaagatcgtcggaacatgttgcagttcaacctgcagatcctgcctaagagtgccaaacagaaagagagagaacgcattcgactgcagaaaaagttccagaaacaatttggggttaggcagaaatgggatcagaaatcacagaaaccccgagactcttcagttgaagttcgtagtgattgggaagtgaaagaggaaatggattttcctcagttgatgaagatgcgctacttggaagtatcagagccacaggacattgagtgttgtggggccctagaatactacgacaaagcctttgaccgcatcaccacgaggagtgagaagccactgcggagcatcaagcgcatcttccacactgtcaccaccacagacgaccctgtcatccgcaagctggcaaaaactcaggggaatgtgtttgccactgatgccatcctggccacgctgatgagctgtacccgctcagtgtattcctgggatattgtcgtccagagagttgggtccaaactcttctttgacaagagagacaactctgactttgacctcctgacagtgagtgagactgccaatgagccccctcaagatgaaggtaattccttcaattcaccccgcaacctggccatggaggcaacctacatcaaccacaatttctcccagcagtgcttgagaatggggaaggaaagatacaacttccccaacccaaacccgtttgtggaggacgacatggataagaatgaaatcgcctctgttgcgtaccgttaccgcaggtggaagcttggagatgatattgaccttattgtccgttgtgagcacgatggcgtcatgactggagccaacggggaagtgtccttcatcaacatcaagacactcaatgagtgggattccaggcactgtaatggcgttgactggcgtcagaagctggactctcagcgaggggctgtcattgccacggagctgaagaacaacagctacaagttggcccggtggacctgctgtgctttgctggctggatctgagtacctcaagcttggttatgtgtctcggtaccacgtgaaagactcctcacgccacgtcatcctaggcacccagcagttcaagcctaatgagtttgccagccagatcaacctgagcgtggagaatgcctggggcattttacgctgcgtcattgacatctgcatgaagctggaggagggcaaatacctcatcctcaaggaccccaacaagcaggtcatccgtgtctacagcctccctgatggcaccttcagctctgatgaagatgaggaggaagaggaggaggaagaagaggaagaagaagaggaagaaacttaaaccagtgatgtggagctggagtttgtccttccaccgagactacgagggcctttgatgcttagtggaatgtgtgtctaacttgctctctgacatttagcagatgaaataaaatatatatctgtttagtctttccctcaaaaaaaaaaaaaaa

SEQ ID NO: 60 - DNA, 2751 bp, Homo sapiens
atggagtcagggcagccggctcgacggattgccatggcgccgctgctggagtacgagcgacagctggtgctggaactgctcgacactgacgggctagtagtgtgcgcccgcgggctcggcgcggaccggctcctctaccactttctccagctgcactgccacccagcctgcctggtgctggtgctcaacacgcagccggccgaggaggagtattttatcaatcagctgaagatagaaggagttgaacacctccctcgccgtgtaacaaatgaaatcacaagcaacagtcgctatgaagtttacacacaaggtggtgttatatttgcgacaagtaggatacttgtggttgacttcttgactgatagaataccttcagatttaattactggcatcttggtgtatagagcccacagaataatcgagtcttgtcaagaagcattcatcttgcgcctctttcgccagaaaaacaaacgtggttttattaaagctttcacagacaatgctgttgcctttgatactggtttttgtcatgtggaaagagtgatgagaaatctttttgtgaggaaactgtatctgtggccaaggttccatgtagcagtaaactcatttttagaacagcacaaacctgaagttgtagaaatccatgtttctatgacacctaccatgcttgctatacagactgctatactggacattttaaatgcatgtctaaaggaactaaaatgccataacccatcgcttgaagtggaagatttatctttagaaaatgctattggaaaaccttttgacaagacaatccgccattatctggatcctttgtggcaccagcttggagccaagactaaatccttagttcaggatttgaagatattacgaactttgctgcagtatctctctcagtatgattgtgtcacatttcttaatcttctggaatctctgagagcaacggaaaaagcttttggtcagaattcaggttggctgtttcttgactccagcacctcgatgtttataaatgctcgagcaagggtttatcatcttccagatgccaaaatgagtaaaaaagaaaaaatatctgaaaaaatggaaattaaagaaggggaagaaacaaaaaaggaactggtcctagaaagcaacccaaagtgggaggcactgactgaagtattaaaagaaattgaggcagaaaataaggagagtgaagctcttggtggtccaggtcaagtactgatttgtgcaagtgatgaccgaacatgttcccagctgagagactatatcactcttggagcggaggccttcttattgaggctctacaggaaaacctttgagaaggatagcaaagctgaagaagtctggatgaaatttaggaaggaagacagttcaaagagaattaggaaatctcacaaaagacctaaagacccccaaaacaaagaacgggcttctaccaaagaaagaaccctcaaaaagaaaaaacggaagttgaccttaactcaaatggtaggaaaacctgaagaactggaagaggaaggagatgtcgaggaaggatatcgtcgagaaataagcagtagcccagaaagctgcccggaagaaattaagcatgaagaatttgatgtaaatttgtcatcggatgctgctttcggaatcctgaaagaacccctcactatcatccatccgcttctgggttgcagcgacccctatgctctgacaagggtactacatgaagtggagccaagatacgtggttctttatgacgcagagctaacctttgttcggcagcttgaaatttacagggcgagtaggcctgggaaacctctgagggtttactttcttatatacggaggttcaactgaggaacaacgctatctcactgctttgcggaaagaaaaggaagcttttgaaaaactcataagggaaaaagcaagcatggttgtccctgaagaaagagaaggcagagatgaaacaaacttagacctagtaagaggcacagcatctgcagatgtttccactgacactcggaaagccggtggccaggaacagaatggtacacagcaaagcatagttgtggatatgcgtgaatttcgaagtgagcttccatctctgatccatcgtcggggcattgacattgaacccgtgactttagaggttggagattacatcctcactccagaaatgtgcgtggagcgcaagagtatcagtgatttaatcggctctttaaataacggccgcctctacagccagtgcatctccatgtcccgctactacaagcgtcccgtgcttctgattgagtttgaccctagcaagcctttctctctcacttcccgaggtgccttgtttcaggagatctccagcaatgacattagttccaaactcactcttcttacacttcacttccccagactacggattctctggtgcccctctcctcatgcaacggcggagttgtttgaggagctgaaacaaagcaagccacagcctgatgcggcgacagcactggccattacagcagattctgaaacccttcccgagtcagagaagtataatcctggtccccaagacttcttgttaaaaatgccaggggtgaatgccaaaaactgccgctccttgatgcaccacgttaagaacatcgcagaattagcagccctgtcacaagacgagctcacgagtattctggggaatgctgcaaatgccaaacagctttatgatttcattcacacctcttttgcagaagtcgtatcaaaaggaaaagggaaaaagtga

SEQ ID NO: 61 - DNA, 1644 bp, Homo sapiens
ggcgagatggcggccaccgagggggtcggggaggctgcgcaagggggcgagcccgggcagccggcgcaacccccgccccagccgcacccaccgccgccccagcagcagcacaaggaagagatggcggccgaggctggggaagccgtggcgtcccccatggacgacgggtttgtgagcctggactcgccctcctatgtcctgtacagggacagagcagaatgggctgatatagatccggtgccgcagaatgatggccccaatcccgtggtccagatcatttatagtgacaaatttagagatgtttatgattacttccgagctgtcctgcagcgtgatgaaagaagtgaacgagcttttaagctaacccgggatgctattgagttaaatgcagccaattatacagtgtggcatttccggagagttcttttgaagtcacttcagaaggatctacatgaggaaatgaactacatcactgcaataattgaggagcagcccaaaaactatcaagtttggcatcataggcgagtattagtggaatggctaagagatccatctcaggagcttgaatttattgctgatattcttaatcaggatgcaaagaattatcatgcctggcagcatcgacaatgggttattcaggaatttaaactttgggataatgagctgcagtatgtggaccaacttctgaaagaggatgtgagaaataactctgtctggaaccaaagatacttcgttatttctaacaccactggctacaatgatcgtgctgtattggagagagaagtccaatacactctggaaatgattaaactagtaccacataatgaaagtgcatggaactatttgaaagggattttgcaggatcgtggtctttccaaatatcctaatctgttaaatcaattacttgatttacaaccaagtcatagttccccctacctaattgcctttcttgtggatatctatgaagacatgctagaaaatcagtgtgacaataaggaagacattcttaataaagcattagagttatgtgaaatcctagctaaagaaaaggacactataagaaaggaatattggagatacattggaagatcccttcaaagcaaacacagcacagaaaatgactcaccaacaaatgtacagcaataacaccatccagaagaacttgatggaatgcttttattttttattaagggaccctgcaggagtttcacacgagagtggtccttccctttgcctgtggtgtaaaagtgcatcacacaggtattgctttttaacaagaactgatgctccttgggtgctgctgctactcagactagctctaagtaatgtgattcttctaaagcaaagtcattggatgggaggaggaagaaaaagtcccataaaggaacttttgtagtcttatcaacatataatctaatcccttagcatcagctcctccctcagtggtacatgcgtcaagatttgtagcagtaataactgcaggtcacttgtatgtaatggatgtgaggtagccgaagtttggttcagtaagcagggaatacagtcgttccatcagagctggtctgcacactcacattatcttgctatcactgtaaccaactaatgccaaaagaacggttttgtaataaaattatagctgtatct

SEQ ID NO: 62 - DNA, 2646 bp, Homo sapiens
ttctgcccgggcgctcgcagccgagcgcggccggggaagggctctcctcccagcgccgagcactgggccctggcagacgccccaagattgttgtgaggagtctagccagttggtgagcgctgtaatctgaaccagctgtgtccagactgaggccccatttgcattgtttaacatacttagaaaatgaagtgttcatttttaacattcctcctccaattggtttaatgctgaattactgaagagggctaagcaaaaccaggtgcttgcgctgagggctctgcagtggctgggaggaccccggcgctctccccgtgtcctctccacgactcgctcggcccctctggaataaaacacccgcgagccccgagggcccagaggaggccgacgtgcccgagctcctccgggggtcccgcccgcgagctttcttctcgccttcgcatctcctcctcgcgcgtcttggacatgccaggaataaaaaggatactcactgttaccattctggctctctgtcttccaagccctgggaatgcacaggcacagtgcacgaatggctttgacctggatcgccagtcaggacagtgtttagatattgatgaatgccgaaccatccccgaggcctgccgaggagacatgatgtgtgttaaccaaaatggcgggtatttatgcattccccggacaaaccctgtgtatcgagggccctactcgaacccctactcgaccccctactcaggtccgtacccagcagctgccccaccactctcagctccaaactatcccacgatctccaggcctcttatatgccgctttggataccagatggatgaaagcaaccaatgtgtggatgtggacgagtgtgcaacagattcccaccagtgcaaccccacccagatctgcatcaatactgaaggcgggtacacctgctcctgcaccgacggatattggcttctggaaggccagtgcttagacattgatgaatgtcgctatggttactgccagcagctctgtgcgaatgttcctggatcctattcttgtacatgcaaccctggttttaccctcaatgaggatggaaggtcttgccaagatgtgaacgagtgtgccaccgagaacccctgcgtgcaaacctgcgtcaacacctacggctctttcatctgccgctgtgacccaggatatgaacttgaggaagatggcgttcattgcagtgatatggacgagtgcagcttctctgagttcctctgccaacatgagtgtgtgaaccagcccggcacatacttctgctcctgccctccaggctacatcctgctggatgacaaccgaagctgccaagacatcaacgaatgtgagcacaggaaccacacgtgcaacctgcagcagacgtgctacaatttacaagggggcttcaaatgcatcgaccccatccgctgtgaggagccttatctgaggatcagtgataaccgctgtatgtgtcctgctgagaaccctggctgcagagaccagccctttaccatcttgtaccgggacatggacgtggtgtcaggacgctccgttcccgctgacatcttccaaatgcaagccacgacccgctaccctggggcctattacattttccagatcaaatctgggaatgagggcagagaattttacatgcggcaaacgggccccatcagtgccaccctggtgatgacacgccccatcaaagggccccgggaaatccagctggacttggaaatgatcactgtcaacactgtcatcaacttcagaggcagctccgtgatccgactgcggatatatgtgtcgcagtacccattctgagcctcgggctggagcctccgacgctgcctctcattggcaccaagggacaggagaagagaggaaataacagagagaatgagagcgacacagacgttaggcatttcctgctgaacgtttccccgaagagtcagccccgacttcctgactctcacctgtactattgcagacctgtcaccctgcaggacttgccacccccagttcctatgacacagttatcaaaaagtattatcattgctcccctgatagaagattgttggtgaattttcaaggccttcagtttatttccactattttcaaagaaaatagattaggtttgcgggggtctgagtctatgttcaaagactgtgaacagcttgctgtcacttcttcacctcttccactccttctctcactgtgttactgctttgcaaagacccgggagctggcggggaaccctgggagtagctagtttgctttttgcgtacacagagaaggctatgtaaacaaaccacagcaggatcgaagggtttttagagaatgtgtttcaaaaccatgcctggtattttcaaccataaaagaagtttcagttgtccttaaatttgtataacggtttaattctgtcttgttcattttgagtatttttaaaaaatatgtcgtagaattccttcgaaaggccttcagacacatgctatgttctgtcttcccaaacccagtctcctctccattttagcccagtgttttctttgaggaccccttaatcttgctttctttagaatttttacccaattggattggaatgcagaggtctccaaactgattaaatatttgaagagaaaaaaaaaaaaaaaaaaaaaaaaa

SEQ ID NO: 63 - DNA, 930 bp, Homo sapiens
gcgagccggagcgacggcggggctggggccggagccgagccggggtcgggcagcagcagggaccccccagaggcggggcctgtgggaccgctatgggcgtggagatcgagaccatctcccccggagacggaaggacattccccaagaagggccaaacgtgtgtggtgcactacacaggaatgctccaaaatgggaagaagtttgattcatccagagacagaaacaaacctttcaagttcagaattggcaaacaggaagtcatcaaaggttttgaagagggtgcagcccagatgagcttggggcagagggcgaagctgacctgcacccctgatgtggcatatggagccacgggccaccccggtgtcatccctcccaatgccaccctcatctttgacgtggagctgctcaacttagagtgaaggcaggaaggaactcaaggtggtggctggagatggctgctgctcaccctcctagcctgctctgccactgggacggctcctgcttttggggctcttgatcagtgtgctaacctcactgcctcatggcatcatccattctctctgcccaagttgctctgtatgtgttcgtcagtgttcatgcgaattcttgcttgaggaaacttcggttgcagattgaagcatttcaggttgtgcattttgtgtgatgcatgtagtagcctttcctgatgacagaacacagatctcttgttcgcacaatctacactgccttaccttcacttaaaccacacacacaaggtgctcagacatgaaatgtacatggcgtaccgtacacagagggacttgagccagttacctttgctgtcactttctctcttataaattctgttagctgctcacttaaacaatgtcctctttgagaaaatgtaaaataaaggctctgtgcttgacaaaaaaaaaaaaaaaaaaaaaa

SEQ ID NO: 64 - DNA, 2265 bp, Homo sapiens
agtcctgcgatttcgggtgtagagggagcaggggcctgcggggacctggtgtgggtggagtggggacaagcggtggagaagggtacgccagggtcgctgagagactctgttctccctggagggactggttgccatgagagcagccgtctgaggggacgcagcctgcactacgcgccccaagaggctgtgcgtggcgagcaggtcacgtgacgggagcgcgggctttggaaggcggctgaacgtcaggccacccgccgctaagctgagaagggagagcgagcttaggaccgcctgcccggggcaaccccgaaccaagctttagccgccgaggccgcgtgtcccaaaggccagtcatccctcctctgtgttgccatgggaattcaaggcctggccaaactaattgctgatgtggcccccagtgccatccgggagaatgacatcaagagctactttggccgtaaggtggccattgatgcctctatgagcatttatcagttcctgattgctgttcgccagggtggggatgtgctgcagaatgaggagggtgagaccaccagccacctgatgggcatgttctaccgcaccattcgcatgatggagaacggcatcaagcccgtgtatgtctttgatggcaagccgccacagctcaagtcaggcgagctggccaaacgcagtgagcggcgggctgaggcagagaagcagctgcagcaggctcaggctgctggggccgagcaggaggtggaaaaattcactaagcggctggtgaaggtcactaagcagcacaatgatgagtgcaaacatctgctgagcctcatgggcatcccttatcttgatgcacccagtgaggcagaggccagctgtgctgccctggtgaaggctggcaaagtctatgctgcggctaccgaggacatggactgcctcaccttcggcagccctgtgctaatgcgacacctgactgccagtgaagccaaaaagctgccaatccaggaattccacctgagccggattctgcaggagctgggcctgaaccaggaacagtttgtggatctgtgcatcctgctaggcagtgactactgtgagagtatccggggtattgggcccaagcgggctgtggacctcatccagaagcacaagagcatcgaggagatcgtgcggcgacttgaccccaacaagtaccctgtgccagaaaattggctccacaaggaggctcaccagctcttcttggaacctgaggtgctggacccagagtctgtggagctgaagtggagcgagccaaatgaagaagagctgatcaagttcatgtgtggtgaaaagcagttctctgaggagcgaatccgcagtggggtcaagaggctgagtaagagccgccaaggcagcacccagggccgcctggatgatttcttcaaggtgaccggctcactctcttcagctaagcgcaaggagccagaacccaagggatccactaagaagaaggcaaagactggggcagcagggaagtttaaaaggggaaaataaatgtgtttccccattatacctccttcaccccagaatatttgccgtcttgtacccttaagagctacagctagagaaaccttcacggggtggagagaggattctaaggcttttctagcgtgacccttttcagtagtgctagtcccttttttacttgatcttaatggcaagaaggccacagaggtacttttccttttttagctcaggaaaatatgtcaggctcaaaccacttctcaggcagtttaatggacactaagtccattgttacatgaaagtgatagatagcaacaagttttggagaagagagagggagataaaagggggagacaaaagatgtacagaaatgatttcctggctggccaactggtggccagtgggaggtgatggtggacctagactgtgcttttctgtcttgttcagccttgacccaccttgagagagagccaccaggaaggcgcatcttagcagatgggaggaactgctgagagaagatgggcagaaagctggagcccctggagttggctgtgtctgtgtttgtgactgattactggctgtgtcttgggtgggcagaaactcgaacttgctatgtaatttgtgtctagttattcagaggagtaagatggtgatgttcacctggcaatcagctgagttgagactttggaataagacactggttttcatgcgctgtttttgttttaaagttatgaagaaaaaagtcaataaaattctaaaagtaaaaaaaaaaaaaaaaaa

SEQ ID NO: 65 - DNA, 2422 bp, Homo sapiens
atttatttgaaatgactatttgttgaacacagtatagttcaaggatattttttcatatgtatttccttaagagagccctgagcctgagattttggaggcttctttcacttgtttgaactttgaaggtatattttatctattttaaaaaacacttaagaattaacaaattctataaagcatcttttttcatagttttcattcatactttcagcaacttgaagggagagtttttaacgtagtctgtgtttttgagcactctgagcatttgatttcttcctggtatcaccggtaaatcactcaatatattattattcccaaaattcgtgaagctaagagatgagccatcttgaaaaacaacctggcatttgactggaggtgatactctctggaatcataggattaacaacttggaaaaggcctatgatactcctggtaaacctctttgtgctgctctctgtggtttgtgtcctcttaaatctagctggatttatcctaggctgccaaggggcccagtttgtgtccagcgtgcccaggtgtgatctggtggacttaggtgaaggcaagatttgcttctgttgtgaagaatttcaaccagccaagtgcacagacaaagaaaatgccttgaaactctttccggttcagccctgtagtgctgttcaccttctacttaagaaagtcctctttgccctgtgtgccttgaatgccctgaccaccaccgtctgcttggtggccgctgccctccgctacctccagatattcgcaaccaggagatcctgcatcgatgaatcccagatttctgctgaagaagcggaggatcatggacgcatccccgaccctgatgattttgtgccgcctgtgcctcccccttcctattttgccacgttttactcgtgcacaccccggatgaaccgcaggatggttggtcctgatgttattcccctgccacacatctacggagctcgaatcaaaggtgtggaagtgttctgtcctctggatcccccgccgccatatgaagctgtggtgagccagatggaccaggagcagggatcttcattccaaatgtcagaaggatcagaagctgctgtgatcccattggatctgggctgcacacaagtgactcaagatggggacattcctaacatacctgccgaagaaaatgcatccacctcaactcccagttcaaccctggtgcgtcctatcagaagccggagagccctcccacccttgaggaccaggtcgaagagtgaccctgtgctccatccttctgaggagagagctgccccagtgctcagctgtgaagctgcaacacagactgaaaggagactggatctggctgcagtgactctgaggagaggcttgagatctagagcttcgcgatgcagaccgcggtctttgatagattacaaatcctacatggacaccaagctgctggtggcgaggttcctggagcagtcctcttgtaccatgaccccagacatccatgaacttgtagaaaacattaaatctgttttgaaatctgatgaggagcacatggaggaagccatcacaagtgccagttttctagaacagataatggccccattgcagcccagcacatccagggcccacaggctgccctcgcggagacagcctggcctgctgcacctccagagctgcggcgaccttcacaccttcacaccagcggggaggccccgagccgagaggaggccccggcgagtggaggctgagcggccacacagcctcattggggtcatccgagagactgtcctgtgaaccctggaagacagaaggccactccaaggggaaggatccctctcctctctgccatttcttggctgggagctgtggtccacctcaaaaaaaaaggagcactctggaggacacgttttcccacctgttggctcccgtgtctgctgactgagggcattcaggagtaaatgcacaggtcggtccaggcccgtctgggtttgggatgcactgagttggaggttatgaaagctttgatcctcttcttcctctgctgggcctcgcagcattcccaagggtcacatgccctggcatgggcagaaactgggctaatgattctttgcccacttcacccctcgtgtctctctttgttgctaagttctttccctcttggaaggacagatctgccgggctgctatttatagttgcctttggcctttcactgctctgcgatttggcaggaaataaggcgattaaccctatgtgtccacaagcctcaagccttgtttcaggtcaccctcaaatcacactctctttaggcaaaacaggaaacttcttaagtgacaaattttaatgccagacatttaaggagaggattattgttgattccatttactcatgcttgcaaaactagagacccctaaggcagaactgagaataaacatgtttactttgg

SEQ ID NO: 66 - DNA, 1042 bp, Homo sapiens
gaaacccggaagtggaactctgagccattcagcgtttgggtgaagacggaggcgggttctacagagacgtaggctgtcagggagtgtttatttcgcgtccgcttctgttcctccgcgcccctgtgctgccccgactcacatactcgtccagaaccggcctcagcctctccgcgcagaagttgcccggagccatggccgagtactcctatgtgaagtctaccaagctcgtgctcaagggaaccaagacgaagagtaagaagaaaaagagcaaagataagaaaagaaaaagagaagaagatgaagaaacccagcttgatattgttggaatctggtggacagtaacaaactttggtgaaatttcaggaaccatagccattgaaatggataagggaacctatatacatgcactcgacaatggtctttttaccctgggagctccacacaaagaagttgatgagggccctagtcctccagagcagtttacggctgtcaaattatctgattccagaattgccctgaagtctggctatggaaaatatcttggtataaattcagatggacttgttgttgggcgttcagatgcaattggaccaagagaacaatgggaaccagtctttcaaaatgggaaaatggctttgttggcctcaaatagctgctttattagatgcaatgaagcaggggacatagaagcaaaaagtaaaacagcaggagaagaagaaatgatcaagattagatcctgtgctgaaagagaaaccaagaaaaaagatgacattccagaagaagacaaaggaaatgtaaaacaatgtgaaatcaattatgtaaagaaatttcagagcttccaagaccacaaacttaaaataagtaaagaagacagtaaaattcttaaaaaggctcggaaagatggatttttgcatgagacgcttctggacaggagagccaaattgaaagccgacagatactgcaagtgactgggatttttgtttctgccttatctttctgtgtttttttctgaataaaatattcagaggaaatgcttttacag

SEQ ID NO: 67 - DNA, 2690 bp, Homo sapiens
ggcacgagcaccatcgctgctggagcagctgccttcaggccctgcgccgcctccggagtccatggccggcacgcgctgggtactcggggcgctgctccggggctgcggctgtaactgcagcagctgccggcgcaccggcgccgcctgcctgcccttctactccgccgcgtcctaccctgccctccgtgcctctctgctgccgcagtcgctggcggcggcggccgccgtcccgacgcgcagctacagccaggagtccaaaactacttacctggaagaccttccaccaccccctgagtatgaattggccccgtccaagttagaagaggaagtggatgatgtctttctcattcgagctcaaggactgccctggtcatgcactatggaagatgtgcttaactttttttcagactgcagaatccgcaacggtgagaatggaatacattttctcctaaacagagatgggaaacgaaggggtgatgccttaattgaaatggagtcagagcaggatgtgcagaaagccttagagaagcaccgcatgtacatgggccagcggtatgtggaagtatatgagataaacaatgaagatgtggatgccttaatgaagagcttgcaggtcaaatcttcgcctgtggtaaatgatggtgtggttcgtttgagaggacttccttatagttgcaatgagaaagacattgtagacttctttgcaggactgaatatagttgacattacttttgtgatggactatagagggaggcgaaaaacaggggaagcctatgtgcaatttgaagaaccagaaatggccaaccaagccctgttgaaacacagggaagaaattggtaatcgatacatcgagatatttccaagcagaaggaatgaagttcgaacacatgtcggttcttataagggaaagaaaatcgcatcttttcctactgctaagtatataactgagccagaaatggtctttgaagaacatgaagtaaatgaggtatttcaacccatgacagcttttgaaagtgagaaggaaatagaattgcctaaggaggtgccagaaaagcttccagaggctgctgattttggaactacgtcttctctgcattttgtccacatgagaggattacctttccaagccaatgcccaagacattataaacttttttgctccactcaagcctgttagaatcaccatggaatacagctccagtgggaaggccactggagaagctgatgtgcactttgagacccatgaggatgctgttgcagcgatgctcaaggatcggtcccacgttcatcataggtatattgaactgttcctgaattcatgtccaaaaggaaaataagactctaggggctccagataataagggtgaagcaagaagcatttcatttgcacatctttcttggacttgggatatacagttccagtttattagcagcaactgctagggaaatgattttggtgttttgggttaattgcttctaagaaaagtttcatagtggactgtttagaagaagaaatgaaagatccagtttgggattatgaaataaaccacaaattaaaatttttgtttaaactgtccaggatctgatttaaaaatatggtctttgttttatatgattaaatggtttgttttcatagatgatatgttactcattgtaaagaccacatatttttattcagcagtgttctttaaacggtttcatttaaaaagtaactttttttttttgcctgtgaattgagtgctctgatgtaaaacttctcatggagtgaaacagtgatttattttaaccaaacattcaccaaagcaaagaacggtttcagacctttgaactggtatggtttggcagaatagttttaaattttgctgtatttgattacttagagataggaatttttaaaaatcaaaacaaaaaataccacagcttagtgtaaatgacaatttggcggttttatgtctttagaaatgttttgcctttctaagccttgtgctaaaggcgtataacggtggtgcctatctacttaagggggcattctagtcttaacttaaaagttgtctaaactgtccctccctggctttttttggtttggggtagacctaagggtgtttgttagtctcaaaactgtgaagtgacatgtcagaacagtccagactggtaagaaaattaatggcttcacttgaatttaaaccagctctagataggaaaaaaatcagtctcctcatttgctttttaaatggagtagtacatcccatattttagaacaagtaggggtgccttgcttaaataaaaatagcatttaatgtataattgtgtgaagggtttatggataaagctgtacttctgtcacaatgtggcagtactttctgctttaatattaaacagcttgttatttaaatattggacaaaatggctggcttcaaaatatagtcattaataaactaactttatgtgcacctgtgtaggagaatcaaaatcctgtatgctttctttgccttgttcctgttctcagggtgacgactgccaccaggagatgcagttctagttcttaaaattaaatttgcccaggtttctgacaggtgatacctggaagagagactatgtcttctcttacttaatacataaccatctttgattaccagctaagatgcgaaatcactgtactgtagtcaataaatgaagacttgtttcaggctg

SEQ ID NO: 68 - DNA, 2365 bp, Homo sapiens
tcccagccttcccatccccccaccgaaagcaaatcattcaacgacccccgaccctccgacggcaggagccccccgacctcccaggcggaccgcccttccctccccgcgcgggttccgggcccggcgagagggcgcgacgacagccgaggccatggaggtgacggcggaccagccgcgctgggtgagccaccaccaccccgccgtgctcaacgggcagcacccggacacgcaccacccgggcctcagccactcctacatggacgcggcgcagtacccgctgccggaggaggtggatgtgctttttaacatcgacggtcaaggcaaccacgtcccgccctactacggaaactcggtcagggccacggtgcagaggtaccctccgacccaccacgggagccaggtgtgccgcccgcctctgcttcatggatccctaccctggctggacggcggcaaagccctgggcagccaccacaccgcctccccctggaatctcagccccttctccaagacgtccatccaccacggctccccggggcccctctccgtctaccccccggcctcgtcctcctccttgtcggggggccacgccagcccgcacctcttcaccttcccgcccaccccgccgaaggacgtctccccggacccatcgctgtccaccccaggctcggccggctcggcccggcaggacgagaaagagtgcctcaagtaccaggtgcccctgcccgacagcatgaagctggagtcgtcccactcccgtggcagcatgaccgccctgggtggagcctcctcgtcgacccaccaccccatcaccacctacccgccctacgtgcccgagtacagctccggactcttcccccccagcagcctgctgggcggctcccccaccggcttcggatgcaagtccaggcccaaggcccggtccagcacaggcagggagtgtgtgaactgtggggcaacctcgaccccactgtggcggcgagatggcacgggacactacctgtgcaacgcctgcgggctctatcacaaaatgaacggacagaaccggcccctcattaagcccaagcgaaggctgtctgcagccaggagagcagggacgtcctgtgcgaactgtcagaccaccacaaccacactctggaggaggaatgccaatggggaccctgtctgcaatgcctgtgggctctactacaagcttcacaatattaacagacccctgactatgaagaaggaaggcatccagaccagaaaccgaaaaatgtctagcaaatccaaaaagtgcaaaaaagtgcatgactcactggaggacttccccaagaacagctcgtttaacccggccgccctctccagacacatgtcctccctgagccacatctcgcccttcagccactccagccacatgctgaccacgcccacgccgatgcacccgccatccagcctgtcctttggaccacaccacccctccagcatggtcaccgccatgggttagagccctgctcgatgctcacagggcccccagcgagagtccctgcagtccctttcgacttgcatttttgcaggagcagtatcatgaagcctaaacgcgatggatatatgtttttgaaggcagaaagcaaaattatgtttgccactttgcaaaggagctcactgtggtgtctgtgttccaaccactgaatctggaccccatctgtgaataagccattctgactcatatcccctatttaacagggtctctagtgctgtgaaaaaaaaaaatcctgaacattgcatataacttatattgtaagaaatactgtacaatgactttattgcatctgggtagctgtaaggcatgaaggatgccaagaagtttaaggaatatgggagaaatagtgtggaaattaagaagaaactaggtctgatattcaaatggacaaactgccagttttgtttcctttcactggccacagttgtttgatgcattaaaagaaaataaaaaaaagaaaaaagagaaaagaaaaaaaaagaaaaaagttgtaggcgaatcatttgttcaaagctgttggccctctgcaaaggaaataccagttctgggcaatcagtgttaccgttcaccagttgccattgagggtttcagagagcctttttctaggcctacatgctttgtgaacaagtccctgtaattgttgtttgtatgtataattcaaagcaccaaaataagaaaagatgtagatttatttcatcatattatacagaccgaactgttgtataaatttatttactgctagtcttaagaactgctttctttcgtttgtttgtttcaatattttccttctctctcaattttcggttgaataaactagattacattcagttggcaaaaaaaaaaaaa

SEQ ID NO: 69 - DNA, 1233 bp, Homo sapiens
gtgatggcggcgccggaggcggaggttctgtcctcagccgcagtccctgatttggagtggtatgagaagtccgaagaaactcacgcctcccagatagaactacttgagacaagctctacgcaggaacctctcaacgcttcggaggccttttgcccaagagactgcatggtaccagtggtgtttcctgggcctgtgagccaggaaggctgctgtcagtttacttgtgaacttctaaagcatatcatgtatcaacgccagcagctccctctgccctatgaacagcttaagcacttttaccgaaaaccttctccccaggcagaggagatgctgaagaagaaacctcgggccaccactgaggtgagcagcaggaaatgccaacaagccctggcagaactggagagtgtcctcagccacctggaggacttctttgcacggacactagtaccgcgagtgctgattctccttgggggcaatgccctaagccccaaggagttctatgaactcgacttgtctctgctggccccctacagcgtggaccagagcctgagcacagcagcttgtttgcgccgtctcttccgagccatattcatggctgatgcctttagcgagcttcaggctcctccactcatgggcaccgtcgtcatggcacagggacaccgcaactgtggagaagattggtttcgacccaagctcaactatcgagtgcccagccggggccataaactgactgtgaccctgtcatgtggcagaccttccatccgaaccacggcttgggaagactacatttggttccaggcaccagtgacatttaaaggcttccgcgagtgaatgagtgcttcttaatcctaaaaacacaatggctgaattatctttctccatgtggcgctgaatcacccatctggtttggagctagagttgcttcctggtgagagaggaagcaactctccttctggttgtctgcctcccctcagatttcctgataggctgatggcatgtggctgtgactgtgactgtaatcattgctgaacaacatctctttgaatcaaaggttgattttcccagagggtgctgggtcaggcatttctattaggagttggaaagcaaaaatgggtccatagacactctatggaggtgtccctttctgctctttgctgtgtcctttcagaatttttaccaggaacataatgtggatgtgacttatgaacttaaatataaaataaatagattcttatt

SEQ ID NO: 70 - DNA, 1151 bp, Homo sapiens
gcccgcctcccggcgcgggtggccgaggcgtagcgctgcgacccccgcacccctgcgaacatggcgctgcgagtggtgcggagcgtgcgggccctgctctgcaccctgcgcgcggtcccgttacccgccgcgccctgcccgccgaggccctggcagctgggggtgggcgccgtccgtacgctgcgcactggacccgctctgctctcggtgcgtaaattcacagagaaacacgaatgggtaacaacagaaaatggcattggaacagtgggaatcagcaattttgcacaggaagcgttgggagatgttgtttattgtagtctccctgaagttgggacaaaattgaacaaacaagatgagtttggtgctttggaaagtgtgaaagctgctagtgaactctattctcctttatcaggagaagtaactgaaattaatgaagctcttgcagaaaatccaggacttgtaaacaaatcttgttatgaagatggttggctgatcaagatgacactgagtaacccttcagaactagatgaacttatgagtgaagaagcatatgagaaatacataaaatctattgaggagtgaaaatggaactcctaaataaactagtatgaaataacgcaagccagcagagttgtcttaaattagtggtggatagaagacttagaatagaaacttttagtattaccgatggggaaaaaaaaactactgttaacactgctaatgaaagaaaatgccctttaactttctaatgattatagataaatataatatgcgtctttttcacaatatcctatgatttttagactaggctctagtgttcagaattcatgaaattatccatggtaaaaactagttataaaaattacataattcaaagataacattgttattcttaagccttatataatattgtaacttgcatgtatccatacctggatttgggatgaaatacttaatgatctttccattggaaataactggaagtgaagaggttttgttgcttgtacagtgtcagatgaggaacaccactatcttaattttgcgatacactgcatttgctggtgctatttttatacagtgaagcaacagctttgcagcaaaataataaaatacttcttcggaaaaaaaaaaaaaaaaaaaaaaaaaaaaaa

SEQ ID NO: 71 - DNA, 10300 bp, Homo sapiens
aactgctagtggctgagtccctggcggggcgcggcggtggaaggtgtcgcgtacgggcttcccgagctgacgtggcttgaattgggaggggggcagctggagcctcaggcggcagcgcttctagaaatgctgagccgattatcaggattagcaaatgttgttttgcatgaattatcaggagatgatgacactgatcagaatatgagggctcccctagaccctgaattacaccaagaatctgacatggaatttaataatactacacaagaagatgttcaggagcgcctggcttatgcagagcaattggtggtggagctaaaagatattattagacagaaggatgttcaactgcagcagaaagatgaagctctacaggaagagagaaaagctgctgataacaaaattaaaaaactaaaacttcatgcgaaggccaaattaacttctttgaataaatacatagaagaaatgaaagcacaaggagggactgttctgcctacagaacctcagtcagaggagcaactttccaagcatgacaagagttctacagaggaagagatggaaatagaaaagataaaacataagctccaggagaaggaggaactaatcagcactttgcaagcccagcttactcaggcacaggcagaacaacctgcacagagttctacagagatggaagaatttgtaatgatgaagcaacagctccaggagaaggaagaattcattagcactttacaagcccagctcagccagacacaggcagagcaagctgcacagcaggtggtccgagagaaagatgcccgctttgaaacacaagttcgtcttcatgaagatgagcttcttcagttagtaacccaggcagatgtggaaacagagatgcaacagaaattgagggtgctgcaaaggaagcttgaggaacacgaagaatccttggtgggccgtgctcaggtcgttgacttgctgcaacaggagctgactgctgctgagcagagaaaccagattctctctcagcagttacagcagatggaagctgagcataatactttgaggaacactgtggaaacagaaagagaggagtccaagattctactggaaaagatggaacttgaagtggcagagagaaaattatccttccataatctgcaggaagaaatgcatcatcttttagaacagtttgagcaagcaggccaagcccaggctgaactagagtctcggtatagtgctttggagcagaagcacaaagcagaaatggaagagaagacctctcatattttgagtcttcaaaagactggacaagagctgcagtctgcctgtgatgctctaaaggatcaaaattcaaagcttctccaagataagaatgaacaggcagttcagtcagcccagaccattcagcaactggaagatcagctccagcaaaaatccaaagaaattagccaatttctaaatagactgcccttgcaacaacatgaaacagcatctcagacttctttcccagatgtttataatgagggcacacaggcagtcactgaggagaatattgcttctttgcagaagagagtggtagaactagagaatgaaaagggagccttgctccttagttctatagagctggaggagctgaaagctgagaatgaaaaactgtcttctcagattactctcctagaggctcagaatagaactggggaggcagacagagaagtcagtgagatcagcattgttgatattgccaacaagaggagctcttctgctgaggaaagtggacaagatgttctagaaaacacattttctcagaaacataaagaattatcagttttattgttggaaatgaaagaagctcaagaggaaattgcatttcttaaattacagctccagggaaaaagggctgaggaagcagatcatgaggtccttgaccagaaagaaatgaaacagatggagggtgagggaatagctccaattaaaatgaaagtatttcttgaagatacagggcaagattttcccttaatgccaaatgaagagagcagtcttccagcagttgaaaaagaacaggcgagcactgaacatcaaagtagaacatctgaggaaatatctttaaatgatgctggagtagaattgaaatcaacaaagcaggatggtgataaatccctttctgctgtaccagatattggtcagtgtcatcaggatgagttggaaaggttaaaaagtcaaattttggagctcgagctaaactttcataaagcacaagaaatctatgagaaaaatttagatgagaaagctaaggaaattagcaacctaaaccagttgattgaggagtttaagaaaaatgctgacaacaacagcagtgcattcactgctttgtctgaagaaagagaccagcttctctctcaggtgaaggaacttagcatggtaacagaattgagggctcaggtaaagcaactggaaatgaaccttgcagaagcagaaaggcaaagaagacttgattatgaaagccaaactgcccatgacaacctgctcactgaacagatccatagtctcagcatagaagccaaatctaaagatgtgaaaattgaagttttacagaatgaactggatgatgtgcagcttcagttttctgagcagagtaccctgataagaagcctgcaaagccagctgcaaaataaggaaagtgaagtgcttgagggggcagaacgtgtaaggcatatctcaagtaaagtggaagaactgtcccaggctctttcacagaaggaacttgaaataacaaaaatggatcagctcttactagagaaaaagagagatgtggaaaccctccaacaaaccatcgaggagaaggatcaacaagtgacagaaatcagctttagtatgactgagaaaatggttcagcttaatgaagagaagttttctcttggggttgaaattaagactcttaaagaacagctaaatttattatccagagctgaggaagcaaaaaaagagcaggtggaagaagataatgaagtttcttctggccttaaacaaaattatgatgagatgagcccagcaggacaaataagtaaggaagaacttcagcatgaatttgaccttctgaagaaagaaaatgagcagagaaagagaaagctccaggcagctcttattaacagaaaggagcttctgcaaagagtcagtagattggaagaagaattagccaacttgaaagatgaatctaagaaagaaatcccactcagtgagactgagaggggagaagtggaagaagataaagaaaacaaagaatactcagaaaaatgtgtgacttctaagtgccaagaaatagaaatttatttaaaacagacaatatctgagaaagaagtggaactacagcatataaggaaggatttggaagaaaagctggcagctgaagagcaattccaggctctggtcaaacagatgaatcagaccttgcaagataaaacaaaccaaatagatttgctccaagcagaaatcagtgaaaaccaagcaattatccagaagttaatcacaagtaacacggatgcaagtgatggggactccgtagcacttgtaaaggaaacagtggtgataagtccaccttgtacaggtagtagtgaacactggaaaccagaactagaagaaaagatactggcccttgaaaaagaaaaggagcaacttcaaaagaagctacaggaagccttaacctcccgcaaggcaattcttaaaaaggcacaggagaaagaaagacatctcagggaggagctaaagcaacagaaagatgactataatcgcttgcaagaacagtttgatgagcaaagcaaggaaaatgagaatattggagaccagctaaggcaactccagattcaagtaagggaatccatagacggaaaactcccaagcacagaccagcaggaatcgtgttcttccactccaggtttagaagaacctttattcaaagccacagaacagcatcacactcaacctgttttagagtccaacttgtgcccagactggccttctcattctgaagatgcgagtgctctgcagggcggaacttctgttgcccagattaaggcccagctgaaggaaatagaggctgagaaagtagagttagaattgaaagttagttctacaacaagtgagcttactaaaaaatcagaagaggtatttcagttacaagagcagataaataaacagggtttagaaatcgagagtctaaagacagtatcccatgaagctgaagtccatgccgaaagcctgcagcagaaattggaaagcagccaactacaaattgctggcctagaacatctaagagaattgcaacctaaactggatgaactgcaaaaactcataagcaaaaaggaagaagacgttagctacctttctggacaacttagtgagaaagaagcagctctcactaaaatacagacagagataatagaacaagaagatttaattaaggctctgcatacacagctagaaatgcaagccaaagagcatgatgagaggataaagcagctacaggtggaactttgtgaaatgaagcaaaaaccagaagagattggagaagaaagtagagcaaagcaacaaatacaaaggaaactgcaagctgcccttatttcccgaaaagaagcactaaaagaaaacaaaagtctccaagaggaattgtctttggccagaggtaccattgaacgtctcaccaagtctctggcagatgtggaaagccaagtttctgctcaaaataaagaaaaagatacggtcttaggaaggttagctcttcttcaagaagaaagagacaaactcattacagaaatggacaggtctttattggaaaatcagagtctcagcagctcctgtgaaagtctaaaactagctctagagggtcttactgaagacaaggaaaagttagtgaaggaaattgaatctttgaaatcttctaagattgcagaaagtactgagtggcaagagaaacacaaggagctacaaaaagagtatgaaattcttctgcagtcctatgagaatgttagtaatgaagcagaaaggattcagcatgtggtggaagctgtgaggcaagagaaacaagaactgtatggcaagttaagaagcacagaggcaaacaagaaggagacagaaaagcagttgcaggaagctgagcaagaaatggaggaaatgaaagaaaagatgagaaagtttgctaaatctaaacagcagaaaatcctagagctggaagaagagaatgaccggcttagggcagaggtgcaccctgcaggagatacagctaaagagtgtatggaaacacttctttcttccaatgccagcatgaaggaagaacttgaaagggtcaaaatggagtatgaaaccctttctaagaagtttcagtctttaatgtctgagaaagactctctaagtgaagaggttcaagatttaaagcatcagatagaagataatgtatctaaacaagctaacctagaggccaccgagaaacatgataaccaaacgaatgtcactgaagagggaacacagtctataccaggtgagactgaagagcaagactctctgagtatgagcacaagacctacatgttcagaatcggttccatcagcgaagagtgccaaccctgctgtaagtaaggatttcagctcacatgatgaaattaataactacctacagcagattgatcagctcaaagaaagaattgctggattagaggaggagaagcagaaaaacaaggaatttagccagactttagaaaatgagaaaaataccttactgagtcagatatcaacaaaggatggtgaactaaaaatgcttcaggaggaagtaaccaaaatgaacctgttaaatcagcaaatccaagaagaactctccagagttaccaaactaaaggagacagcagaagaagagaaagatgatttggaagagaggcttatgaatcaattagcagaacttaatggaagcattgggaattactgtcaggatgttacagatgcccaaataaaaaatgagctattggaatctgaaatgaagaaccttaaaaagtgtgtgagtgaattggaagaagaaaagcagcagttagtcaaggaaaaaactaaggtggaatcagaaatacgaaaggaatatttggagaaaatacaaggtgctcagaaagaacccggaaataaaagccatgcaaaggaacttcaggaactgttaaaagaaaaacaacaagaagtaaagcagctacagaaggactgcatcaggtatcaagagaaaattagtgctctggagagaactgttaaagctctagaatttgttcaaactgaatctcaaaaagatttggaaataaccaaagaaaatctggctcaagcagttgaacaccgcaaaaaggcacaagcagaattagctagcttcaaagtcctgctagatgacactcaaagtgaagcagcaagggtcctagcagacaatctcaagttgaaaaaggaacttcagtcaaataaagaatcagttaaaagccagatgaaacaaaaggatgaagatcttgagcgaagactggaacaggcagaagagaagcacctgaaagagaagaagaatatgcaagagaaactggatgctttgcgcagagaaaaagtccacttggaagagacaattggagagattcaggttactttgaacaagaaagacaaggaagttcagcaacttcaggaaaacttggacagtactgtgacccagcttgcagcctttactaagagcatgtcttccctccaggatgatcgtgacagggtgatagatgaagctaagaaatgggagaggaagtttagtgatgcgattcaaagcaaagaagaagaaattagactcaaagaagataattgcagtgttctaaaggatcaacttagacagatgtccatccatatggaagaattaaagattaacatttccaggcttgaacatgacaagcagatttgggagtccaaggcccagacagaggtccagcttcagcagaaggtctgtgatactctacagggggaaaacaaagaacttttgtcccagctagaagagacacgccacctataccacagttctcagaatgaattagctaagttggaatcagaacttaagagtctcaaagaccagttgactgatttaagtaactctttagaaaaatgtaaggaacaaaaaggaaacttggaagggatcataaggcagcaagaggctgatattcaaaattctaagttcagttatgaacaactggagactgatcttcaggcctccagagaactgaccagtaggctgcatgaagaaataaatatgaaagagcaaaagattataagcctgctttctggcaaggaagaggcaatccaagtagctattgctgaactgcgtcagcaacatgataaagaaattaaagagctggaaaacctgctgtcccaggaggaagaggagaatattgttttagaagaggagaacaaaaaggctgttgataaaaccaatcagcttatggaaacactgaaaaccatcaaaaaggaaaacattcagcaaaaggcacagttggattcctttgttaaatccatgtcttctctccaaaatgatcgagaccgcatagtgggtgactatcaacagctggaagagcgacatctctctataatcttggaaaaagaccaactcatccaagaggctgctgcagagaataataagcttaaagaagaaatacgaggcttgagaagtcatatggatgatctcaattctgagaatgccaagctagatgcagaactgatccaatatagagaagacctgaaccaagtgataacaataaaggacagccaacaaaagcagcttcttgaagttcaacttcagcaaaataaggagctggaaaataaatatgctaaattagaagaaaagctgaaggaatctgaggaagcaaatgaggatctgcggaggtcctttaatgccctacaagaagagaaacaagatttatctaaagagattgagagtttgaaagtatctatatcccagctaacaagacaagtaacagccttgcaagaagaaggtactttaggactctatcatgcccagttaaaagtaaaagaagaagaggtacacaggttaagtgctttgttttcctcctctcaaaagagaattgcagaactggaagaagaattggtttgtgttcaaaaggaagctgccaagaaggtaggtgaaattgaagataaactgaagaaagaattaaagcatcttcatcatgatgcagggataatgagaaatgaaactgaaacagcagaagagagagtggcagagctagcaagagatttggtggagatggaacagaaattactcatggtcaccaaagaaaataaaggtctcacagcacaaattcagtcttttggaaggtctatgagttccttgcaaaatagtagagatcatgccaatgaggaacttgatgaactgaaaaggaaatatgatgccagtctgaaggaattggcacagttgaaagaacagggactcttaaacagagagagagatgctcttctttctgaaaccgccttttcaatgaactccactgaggagaatagcttgtctcaccttgagaaacttaaccaacagctcctatccaaagatgagcaattgcttcacttgtcctcacaactagaagattcttataaccaagtgcagtccttttccaaggctatggccagtctgcagaatgagagagatcacctgtggaatgagctggagaaatttcgaaagtcagaggaagggaagcagaggtctgcagctcagccttccaccagcccagctgaagtacagagtttaaaaaaagctatgtcttcactccaaaatgacagagacagactactgaaggaattgaagaatctgcagcagcaatacttacagattaatcaagagatcactgagttacatccactgaaggctcaacttcaggagtatcaagataagacaaaagcatttcagattatgcaagaagagctcaggcaggaaaacctctcctggcagcatgagctgcatcagctcaggatggagaagagttcctgggaaatacatgagaggagaatgaaggaacagtaccttatggctatctcagataaagatcagcagctcagtcatctgcagaatcttataagggaattgaggtcttcttcctcccagactcagcctctcaaagtgcaataccaaagacaggcatccccagagacatcagcttccccagatgggtcacaaaatctggtttatgagacagaacttctcaggacccagctcaatgacagcttaaaggaaattcaccaaaaggagttaagaattcagcaactgaacagcaacttctctcagctactggaagagaaaaacaccctttccattcagctctgcgataccagtcagagtcttcgtgagaaccagcagcactatggtgaccttttaaatcactgtgcagtcttggagaagcaggttcaagagctgcaggcggggccactaaatatagatgttgctccaggagctccccaggaaaagaatggagttcacagaaagagtgaccctgaggaactaagggaaccgcagcaaagcttttctgaagctcagcagcagctatgcaacaccagacaggaagtgaatgaattaaggaagctgctggaagaagaacgagaccaaagagtggctgctgagaatgctctctctgtggccgaggagcagatcagacggttagagcacagtgaatgggactcttcccggactcctatcattggctcctgtggcactcaggagcaggcactgttaatagatcttacaagcaacagttgtcgaaggacccggagtggcgttggatggaagcgagtcctgcgttcactctgtcattcacggacccgagtgccacttctagcagccatctactttctaatgattcatgtcctgctcattctgtgttttacgggccatctatagacttagttgttactctttggaccactcccttcaaaacttggaattctctcacctctaacatcagaacatcaattccagtggaacagtcttcccatttacaggtcttctctccaactcttcacggaaagtgcctgcaaaaacagaggtggatacgaggacaggttggagctgcagggactggcgagtctgctttcttctactgccctgagcctgaacgcttctgcttaatctgagaatcacatttggtttgttgagcctaatatttgttgagattttgcaggaccctgatcttttgtggtcctgtaaaagatactgaggaatgtctttcagccaagccaagaggatggtttcaataaacctaataatctgaagttcagctttttttttttttttt

SEQ ID NO: 72 - DNA, 2276 bp, Homo sapiens
ctcattgaactcgcctgcagctcttgggttttttgtggcttccttcgttattggagccaggcctacaccccagcaaccatgtccaagggacctgcagttggtattgatcttggcaccacctactcttgtgtgggtgttttccagcacggaaaagtcgagataattgccaatgatcagggaaaccgaaccactccaagctatgtcgcctttacggacactgaacggttgatcggtgatgccgcaaagaatcaagttgcaatgaaccccaccaacacagtttttgatgccaaacgtctgattggacgcagatttgatgatgctgttgtccagtctgatatgaaacattggccctttatggtggtgaatgatgctggcaggcccaaggtccaagtagaatacaagggagagaccaaaagcttctatccagaggaggtgtcttctatggttctgacaaagatgaaggaaattgcagaagcctaccttgggaagactgttaccaatgctgtggtcacagtgccagcttactttaatgactctcagcgtcaggctaccaaagatgctggaactattgctggtctcaatgtacttagaattattaatgagccaactgctgctgctattgcttacggcttagacaaaaaggttggagcagaaagaaacgtgctcatctttgacctgggaggtggcacttttgatgtgtcaatcctcactattgaggatggaatctttgaggtcaagtctacagctggagacacccacttgggtggagaagattttgacaaccgaatggtcaaccattttattgctgagtttaagcgcaagcataagaaggacatcagtgagaacaagagagctgtaagacgcctccgtactgcttgtgaacgtgctaagcgtaccctctcttccagcacccaggccagtattgagatcgattctctctatgaaggaatcgacttctatacctccattacccgtgcccgatttgaagaactgaatgctgacctgttccgtggcaccctggacccagtagagaaagcccttcgagatgccaaactagacaagtcacagattcatgatattgtcctggttggtggttctactcgtatccccaagattcagaagcttctccaagacttcttcaatggaaaagaactgaataagagcatcaaccctgatgaagctgttgcttatggtgcagctgtccaggcagccatcttgtctggagacaagtctgagaatgttcaagatttgctgctcttggatgtcactcctctttcccttggtattgaaactgctggtggagtcatgactgtcctcatcaagcgtaataccaccattcctaccaagcagacacagaccttcactacctattctgacaaccagcctggtgtgcttattcaggtttatgaaggcgagcgtgccatgacaaaggataacaacctgcttggcaagtttgaactcacaggcatacctcctgcaccccgaggtgttcctcagattgaagtcacttttgacattgatgccaatggtatactcaatgtctctgctgtggacaagagtacgggaaaagagaacaagattactatcactaatgacaagggccgtttgagcaaggaagacattgaacgtatggtccaggaagctgagaagtacaaagctgaagatgagaagcagagggacaaggtgtcatccaagaattcacttgagtcctatgccttcaacatgaaagcaactgttgaagatgagaaacttcaaggcaagattaacgatgaggacaaacagaagattctggacaagtgtaatgaaattatcaactggcttgataagaatcagactgctgagaaggaagaatttgaacatcaacagaaagagctggagaaagtttgcaaccccatcatcaccaagctgtaccagagtgcaggaggcatgccaggaggaatgcctgggggatttcctggtggtggagctcctccctctggtggtgcttcctcagggcccaccattgaagaggttgattaagccaaccaagtgtagatgtagcattgttccacacatttaaaacatttgaaggacctaaattcgtagcaaattctgtggcagttttaaaaagttaagctgctatagtaagttactgggcattctcaatacttgaatatggaacatatgcacaggggaaggaaataacattgcactttataaacactgtattgtaagtggaaaatgcaatgtcttaaataaaactatttaaaattggcaccataaaaaaaaaaaaaaaa

SEQ ID NO: 73 - DNA, 2444 bp, Homo sapiens
gcgttctcgggaagctgctgccgtagctgccgccgccgctaccaccgcgttcgggtgtagaatttggaatccctgcgccgcgttaacaatgaagcagagttcgaacgtgccggctttcctcagcaagctgtggacgcttgtggaggaaacccacactaacgagttcatcacctggagccagaatggccaaagttttctggtcttggatgagcaacgatttgcaaaagaaattcttcccaaatatttcaagcacaataatatggcaagctttgtgaggcaactgaatatgtatggtttccgtaaagtagtacatatcgactctggaattgtaaagcaagaaagagatggtcctgtagaatttcagcatccttacttcaaacaaggacaggatgacttgttggagaacattaaaaggaaggtttcatcttcaaaaccagaagaaaataaaattcgtcaggaagatttaacaaaaattataagtagtgctcagaaggttcagataaaacaggaaactattgagtccaggctttctgaattaaaaagtgagaatgagtccctttggaaggaggtgtcagaattacgagcaaagcatgcacaacagcaacaagttattcgaaagattgtccagtttattgttacattggttcaaaataaccaacttgtgagtttaaaacgtaaaaggcctctacttctaaacactaatggagcccaaaagaagaacctgtttcagcacatagtcaaagaaccaactgataatcatcatcataaagttccacacagtaggactgaaggtttaaagccaagggagaggatttcagatgacatcattatttatgatgttactgatgataatgcagatgaagaaaatatcccagttattccagaaactaatgaggatgttatatctgatccctccaactgtagccagtaccctgatattgtcatcgttgaagatgacaatgaagatgagtatgcacctgtcattcagagtggagagcagaatgaaccagccagagaatccctaagttcaggcagtgatggcagcagccctctcatgtctagtgctgtccagctaaatggctcatccagtctgacctcagaagatccagtgaccatgatggattccattttgaatgataacatcaatcttttgggaaaggttgagctgttggattatcttgacagtattgactgcagtttagaggacttccaggccatgctatcaggaagacaatttagcatagacccagatctcctggttgatcttttcactagttctgtgcagatgaatcccacagattacatcaataatacaaaatctgagaataaaggattagaaactaccaagaacaatgtagttcagccagtttcggaagagggaagaaaatctaaatccaaaccagataagcagcttatccagtataccgcctttccacttcttgcattcctcgatgggaaccctgcttcttctgttgaacaggcgagtacaacagcatcatcagaagttttgtcctctgtagataaacccatagaagttgatgagcttctggatagcagcctagacccagaaccaacccaaagtaagcttgttcgcctggagccattgactgaagctgaagctagtgaagctacactgttttatttatgtgaacttgctcctgcacctctggatagtgatatgccacttttagatagctaaatccccaggaagtggactttacatgtatatattcatcaaaatgatgaactatttattttaaagtatcatttggtactttttttgtaaattgctttgttttgtttaatcagatactgtggaataaaagcaccttttgcttttctcactaaccacacactcttgcagagctttcaggtgttactcagctgcatagttacgcagatgtaatgcacattattggcgtatctttaagttggattcaaatggccatttttctccaattttggtaaattggatatcttttttttacaaatacgaccattaacctcagttaaatttttgtttgttttcctgtttgatgctgtctatttgcattgagtgtaagtcatttgaactaatggtataactcctaaagcttctctgctccagttatttttattaaatatttttcacttggcttatttttaaaactgggaacataaagtgcctgtatcttgtaaaacttcatttgtttcttttggttcagagaagttcatttatgttcaaagacgtttattcatgttcaacaggaaagacaaagtgtacgtgaatgctcgctgtctgatagggttccagctccatatatatagaaagatcgggggtgggatgggatggagtgagccccatccagttagttggactagttttaaataaaggttttccggtttgtgtttttttgaaccatactgtttataaaataaatacaatgaatgttgagtactagtgg

SEQ ID NO: 74 - DNA, 2092 bp, Homo sapiens
ggaggctgagacttcgagagggacttagagaaggcagacgcatcccgaactcgctggaggacaaggctcagctcttgccaggccaaattgagacatgtctgacacaagcgagagtggtgcaggtctaactcgcttccaggctgaagcttcagaaaaggacagtagctcgatgatgcagactctgttgacagtgacccagaatgtggaggtcccagagacaccgaaggcctcaaaggcactggaggtctcagaggatgtgaaggtctcaaaagcctctggggtctcaaaggccacagaggtctcaaagaccccagaggctcgggaggcacctgccacccaggcctcatctactactcagctgactgatacccaggttctggcagctgaaaacaagagtctagcagctgacaccaagaaacagaatgctgacccgcaggctgtgacaatgcctgccactgagaccaaaaaggtcagccatgtggctgatacaaaggtcaatacaaaggctcaggagactgaggctgcaccctctcaggccccagcagatgaacctgagcctgagagtgcagctgcccagtctcaggagaatcaggatactcggcccaaggtcaaagccaagaaagcccgaaaggtgaagcatctggatggggaagaggatggcagcagtgatcagagtcaggcttctggaaccacaggtggccgaagggtctcaaaggccctaatggcctcaatggcccgcagggcttcaaggggtcccatagccttttgggcccgcagggcatcaaggactcggttggctgcttgggcccggagagccttgctctccctgagatcacctaaagcccgtaggggcaaggctcgccgtagagctgccaagctccagtcatcccaagagcctgaagcaccaccacctcgggatgtggcccttttgcaagggagggcaaatgatttggtgaagtaccttttggctaaagaccagacgaagattcccatcaagcgctcggacatgctgaaggacatcatcaaagaatacactgatgtgtaccccgaaatcattgaacgagcaggctattccttggagaaggtatttgggattcaattgaaggaaattgataagaatgaccacttgtacattcttctcagcaccttagagcccactgatgcaggcatactgggaacgactaaggactcacccaagctgggtctgctcatggtgcttcttagcatcatcttcatgaatggaaatcggtccagtgaggctgtcatctgggaggtgctgcgcaagttggggctgcgccctgggatacatcattcactctttggggacgtgaagaagctcatcactgatgagtttgtgaagcagaagtacctggactatgccagagtccccaatagcaatccccctgaatatgagttcttctggggcctgcgctcttactatgagaccagcaagatgaaagtcctcaagtttgcctgcaaggtacaaaagaaggatcccaaggaatgggcagctcagtaccgagaggcgatggaagcggatttgaaggctgcagctgaggctgcagctgaagccaaggctagggccgagattagagctcgaatgggcattgggctcggctcggagaatgctgccgggccctgcaactgggacgaagctgatatcggaccctgggccaaagcccggatccaggcgggagcagaagctaaagccaaagcccaagagagtggcagtgccagcactggtgccagtaccagtaccaataacagtgccagtgccagtgccagcaccagtggtggcttcagtgctggtgccagcctgaccgccactctcacatttgggctcttcgctggccttggtggagctggtgccagcaccagtggcagctctggtgcctgtggtttctcctacaagtgagattttagatattgttaatcctgccagtctttctcttcaagccagggtgcatcctcagaaacctactcaacacagcactctaggcagccactatcaatcaattgaagttgacactctgcattaaatctatttgccatttcaaaaaaaaaaaaaaaaaaaaaaaaaaaaaaaaaaaaa

SEQ ID NO: 75 - DNA, 2230 bp, Homo sapiens
cttggagacaacatgtggttcttgacaactctgctcctttgggttccagttgatgggcaagtggacaccacaaaggcagtgatcactttgcagcctccatgggtcagcgtgttccaagaggaaaccgtaaccttgcattgtgaggtgctccatctgcctgggagcagctctacacagtggtttctcaatggcacagccactcagacctcgacccccagctacagaatcacctctgccagtgtcaatgacagtggtgaatacaggtgccagagaggtctctcagggcgaagtgaccccatacagctggaaatccacagaggctggctactactgcaggtctccagcagagtcttcacggaaggagaacctctggccttgaggtgtcatgcgtggaaggataagctggtgtacaatgtgctttactatcgaaatggcaaagcctttaagtttttccactggaattctaacctcaccattctgaaaaccaacataagtcacaatggcacctaccattgctcaggcatgggaaagcatcgctacacatcagcaggaatatctgtcactgtgaaagagctatttccagctccagtgctgaatgcatctgtgacatccccactcctggaggggaatctggtcaccctgagctgtgaaacaaagttgctcttgcagaggcctggtttgcagctttacttctccttctacatgggcagcaagaccctgcgaggcaggaacacatcctctgaataccaaatactaactgctagaagagaagactctgggttatactggtgcgaggctgccacagaggatggaaatgtccttaagcgcagccctgagttggagcttcaagtgcttggcctccagttaccaactcctgtctggtttcatgtccttttctatctggcagtgggaataatgtttttagtgaacactgttctctgggtgacaatacgtaaagaactgaaaagaaagaaaaagtgggatttagaaatctctttggattctggtcatgagaagaaggtaatttccagccttcaagaagacagacatttagaagaagagctgaaatgtcaggaacaaaaagaagaacagctgcaggaaggggtgcaccggaaggagccccagggggccacgtagcagcggctcagtgggtggccatcgatctggaccgtcccctgcccacttgctccccgtgagcactgcgtacaaacatccaaaagttcaacaacaccagaactgtgtgtctcatggtatgtaactcttaaagcaaataaatgaactgacttcaactgggatacatttggaaatgtggtcatcaaagatgacttgaaatgaggcctactctaaagaattcttgaaaaacttacaagtcaagcctagcctgataatcctattacatagtttgaaaaatagtattttatttctcagaacaaggtaaaaaggtgagtgggtgcatatgtacagaagattaagacagagaaacagacagaaagagacacacacacagccaggagtgggtagatttcagggagacaagagggaatagtatagacaataaggaaggaaatagtacttacaaatgactcctaagggactgtgagactgagagggctcacgcctctgtgttcaggatacttagttcatggcttttctctttgactttactaaaagagaatgtctccatacgcgttctaggcatacaagggggtaactcatgatgagaaatggatgtgttattcttgccctctcttttgaggctctctcataacccctctatttctagagacaacaaaaatgctgccagtcctaggcccctgccctgtaggaaggcagaatgtaactgttctgtttgtttaacgattaagtccaaatctccaagtgcggcactgcaaagagacgcttcaagtggggagaagcggcgataccatagagtccagatcttgcctccagagatttgctttaccttcctgattttctggttactaattagcttcaggatacgctgctctcatacttgggctgtagtttggagacaaaatattttcctgccactgtgtaacatagctgaggtaaaaactgaactatgtaaatgactctactaaaagtttagggaaaaaaaacaggaggagtatgacacaaaaaaaaaaaaaaaaaaaaaaaaaaaaaaaaaaaaaaaaaaaaaaaaaaaaaaaaaaaaaaaaaaaaaaaaaaaaaaaaaaaaaaaaaaaaa

SEQ ID NO: 76 - DNA, 2269 bp, Homo sapiens
cagtacattgagctccatagagacagcgccggggcaagtgagagccggacgggcactgggcgactctgtgcctcgctgaggaaaaataactaaacatgggcaaaggagatcctaagaagccgagaggcaaaatgtcatcatatgcattttttgtgcaaacttgtcgggaggagcataagaagaagcacccagatgcttcagtcaacttctcagagttttctaagaagtgctcagagaggtggaagaccatgtctgctaaagagaaaggaaaatttgaagatatggcaaaagcggacaaggcccgttatgaaagagaaatgaaaacctatatccctcccaaaggggagacaaaaaagaagttcaaggatcccaatgcacccaagaggcctccttcggccttcttcctcttctgctctgagtatcgcccaaaaatcaaaggagaacatcctggcctgtccattggtgatgttgcgaagaaactgggagagatgtggaataacactgctgcagatgacaagcagccttatgaaaagaaggctgcgaagctgaaggaaaaatacgaaaaggatattgctgcatatcgagctaaaggaaagcctgatgcagcaaaaaagggagttgtcaaggctgaaaaaagcaagaaaaagaaggaagaggaggaagatgaggaagatgaagaggatgaggaggaggaggaagatgaagaagatgaagatgaagaagaagatgatgatgatgaataagttggttctagcgcagttttttttttttcttgtctataaagcatttaacccccctgtacacaactcactccttttaaagaaaaaaattgaaatgtaaggctgtgtaagatttgtttttaaactgtacagtgtctttttttgtatagttaacacactaccgaatgtgtctttagatagccctgtcctggtggtattttcaatagccactaaccttgcctggtacagtatgggggttgtaaattggcatggaaatttaaagcaggttcttgttggtgcacagcacaaattagttatatatggggatggtagttttttcatcttcagttgtctctgatgcagcttatacgaaataattgttgttctgttaactgaataccactctgtaattgcaaaaaaaaaaaagttgcagctgttttgttgacattctgaatgcttctaagtaaatacaattttttttattagtattgttgtccttttcataggtctgaaatttttcttcttgaggggaagctagtcttttgcttttgcccattttgaatcacatgaattattacagtgtctatcctttcatatagttagctaataaaaagcttttgtctacacaccctgcatatcataatgggggtaaagttaagttgagatagttttcatccataactgaacatccaaaatcttgatcagttaagaaatttcacatagcccacttacatttacaaactgaagagtaatcaatctactcaaagcatgggattattagaatcaaacattttgaaagtctgtccttgaaggactaatagaaaagtatgttctaacctttacatgaggactctattctttaactcccattaccatgtaatggcagttatattttgcagttcccacattaaagaagacctgagaatgtatccccaaaagcgtgagcttaaaatacaagactgccatattaaattttttgttgacattagtctcagtgaagactatgaaaatgctggctatagatgtcttttcccatttatctaaatatggactgctcaggaaacgagactttcattacaagtatttttaattaattgggccagcttttcaaacaaagatgccacattcaaaatagggtatattttcctatattacggtttgcccctttataaatccaagtagataggaagaaagaagacaaactttgcatctcagtatgaattattcaatttatttgaatgatttttctttacaaaacaaactcattcattagtcatgtttatctgcttaggagtttagggaacaatttggcaattttgtggttttcgagattatcgttttcttaaagtgccagtattttaaaatagcgttcttgtaattttacacgcttttgtgatggagtgctgttttgttatataatttagacttggattctttccatttgcatttgtttatgtaatttcaggaggaatactgaacatctgagtcctggatgatactaataaactaataattgcagtaaaaaaaaaaaaaaaaaaaaaaaaaaaaaa

SEQ ID NO: 77 - DNA, 3829 bp, Homo sapiens
agggtggacagccacgcctctgcggagggcgaccggaagtgctcacgtcttcaccttccccgccacgccaccgtcctttcaggcccagcgtgcagcaggaaggaggactcttttgccgcggactcaagccggaagccgccttcctagtggagacgcgagtgggggaggagcagtccgaggggaacgtgggttgaacgttgcaactagggtggagatcaagctggaacaggagttccgatcgacccggtaccaagaaggggagtgcccgcggcagggttcattgaaaaaatccttagtgatattgacatgtctcaagtgacataaattagccaatgactcggaatgatggattctccgaagattggaaatggtttgccagtgattggaccagggactgatatagggatatcttcactccacatggtggggtatttgggaaaaaattttgattcagctaaagttccatcagatgagtattgccctgcttgtagagagaagggaaagttaaaagccttaaagacttaccgaattagttttcaagaatctatctttttgtgtgaggatctgcagtgcatctatcctttgggctctaaatcacttaataacctaatttctcctgatttggaagaatgtcacactccacataagcctcagaaaaggaagagcttagaaagcagctataaggattcacttcttttagcaaattccaaaaagactagaaattatattgctattgacggtggaaaagttttgaacagcaaacataatggagaagtatatgacgaaacctcgtcaaacttacctgatagtagtggtcaacagaatccaattaggacagctgattccttggagcggaatgagattttggaagctgatactgttgacatggctactacaaaagatcctgctacagttgatgtctctggaactggcagaccttcccctcaaaatgaaggatgtacatctaagctggaaatgccactggagagcaaatgtacatcatttccccaggctttatgtgtccagtggaaaaatgcttatgctctctgttggttagactgtatcctgtcagctttggtgcactcggaagagttaaagaacaccgtgactggactgtgctcgaaggaggaatctatattctggcggttgcttacaaaatataatcaagcaaatacacttctatataccagtcaattgagtggtgttaaagatggagattgtaaaaaacttacctcagaaatatttgcagagatagagacctgtctgaatgaagttagagatgaaatttttattagccttcagccccagcttagatgcacattaggtgatatggaaagccctgtgtttgcatttcccctgctcttaaaactagaaacccacattgaaaagctcttcctatattctttttcttgggactttgaatgttcgcagtgtggacaccaatatcaaaacaggcatatgaagagtctggtcacctttacaaatgtcatccctgagtggcacccacttaatgctgcccattttggtccatgtaacaattgcaacagtaaatcacaaataagaaaaatggtattagaaaaagtatctcccatattcatgttgcactttgtagaaggcttaccacagaatgacttgcagcactatgcatttcattttgaaggctgtctttatcagataacttctgtaattcagtatcgagcaaataatcattttataacatggattttagatgctgatggaagttggctggaatgtgatgacttaaaaggcccatgttctgaaaggcacaagaaatttgaagttcctgcttcagagatacatattgttatttgggaaagaaaaatatcccaagtgacagataaagaagctgcctgccttccacttaaaaagactaatgaccaacacgctctcagtaatgagaaaccagtatcttcaacatcgtgttctgtgggtgatgctgcctcagctgaaacagcctcagtaactcaccctaaagatatatcagttgcccctcgtactctttcacaggacacagctgtaactcatggagatcatttactttcaggtccaaaaggtttggttgacaatattttacctctgacacttgaagaaactatccagaaaacagcctcagtttcacagttaaattctgaagctttcctgttagaaaataaacctgtagcagaaaatacaggaattctcaaaaccaatactttgctatcacaagaatcactaatggcttcttcagtatcagctccatgtaatgaaaagcttattcaagaccaatttgtggacataagttttccatcccaagttgtaaatacaaacatgcagtcagtacagctgaatacagaagatactgtaaatactaaatctgtgaataatactgatgctactggtcttatacagggagtgaagtcagtagaaattgagaaggacgctcagttaaaacaattccttacaccaaaaactgaacaattaaaaccagaacgtgtcacatctcaggtatctaatttgaagaaaaaagaaactacagcagattctcaaaccacaacatctaagtcattacagaatcagtctctgaaagaaaatcagaagaagccatttgtgggaagttgggttaaaggcttaataagcaggggtgcttcttttatgccactctgtgtttcagctcataatagaaacactataactgatttacaaccttcagttaaaggggtaaataattttggtggctttaaaactaaaggtataaaccagaaggccagccacgtatccaagaaagctcgtaagagtgcaagtaagcctcctcccatcagtaagccaccagcaggccctccatcgtctaatggcacagctgcccacccacatgctcatgctgcttcagaagttttggaaaagtctggaagcacctcatgtggagctcaactcaaccacagttcttatgggaatggtatttcttcagcaaaccatgaagacttggtggaaggtcagattcataaacttcgtctaaaacttcgtaaaaagctaaaggcagaaaagaagaaattagctgctcttatgtcttccccgcaaagcagaacagttcgaagtgaaaatctagaacaggtgccccaggatgggtctccaaatgattgtgaatcaatagaggacttgttaaatgagctaccatatccaattgatattgccaatgagtctgcatgcaccactgttcctggtgtttccctgtacagtagtcaaactcatgaagaaattttagcggaattattgtctcctacacctgtttcaacagagctgtcagaaaatggggaaggtgactttaggtatttgggaatgggagatagtcatatcccaccaccagtaccaagtgaattcaatgatgtttcccagaacacacatctgagacaggaccataattattgtagccccaccaagaaaaatccatgtgaagttcagccagactctctgacaaataatgcctgcgttagaacattaaacttggagagtccgatgaagactgatattttcgatgagtttttttcctcctcagcattaaatgctttagcaaatgacacattagacctacctcatttcgatgaatatctgtttgagaattattgaattaatgcttgttaacttttttcatataatatttattattattagaagaacttacaatgtgttcaggtagtgttttatacactggacttgtgtaattacttgtgtaataaccatgaacaaaatgcaaggtttaacctttggttctgcccatgaagcatgtaatctttcttacacattaaaatcactgaatgtgtaaaaaaaaaaaaaa

SEQ ID NO: 78 - DNA, 666 bp, Homo sapiens
gcaggcttggctgcgccctctcgcgccgcacgctctgcgggttcctcccttcttccgagcctctcctctggccgccgcgcgggagagaggccgagatggcagatgagattgccaaggctcaggtcgctcggcctggtggcgacacgatctttgggaagatcatccgcaaggaaataccagccaaaatcatttttgaggatgaccggtgccttgctttccatgacatttcccctcaagcaccaacacattttctggtgatacccaagaaacatatatcccagatttctgtggcagaagatgatgatgaaagtcttcttggacacttaatgattgttggcaagaaatgtgctgctgatctgggcctgaataagggttatcgaatggtggtgaatgaaggttcagatggtggacagtctgtctatcacgttcatctccatgttcttggaggtcggcaaatgcattggcctcctggttaagcacgttttggggataattttctcttctttaggcaatgattaagttaggcaatttccagtatgttaagtaacacacttatttttgcctgtgtatggagagattcaagaaataattttaaaaccgcatacataataaaagacattgttgcatggcttgtaaaaaaaaaaaaaaaaaaaaaaaaaaaaaaaa

SEQ ID NO: 79 - DNA, 3600 bp, Homo sapiens
gaggcactagggatcgtccgcaggattgggactgatacagaggccgccacggagcccgccggagccaccgttcctgctgctgccgccgctgcccgaatcggaaccgtcgggccgcagccgccggcaatgccgcgaaggaagaggaatgcaggcagtagttcagatggaaccgaagattccgatttttctacagatctcgagcacacagacagttcagaaagtgatggcacatcccgacgatctgctcgagtcacccgctcctcagccaggctaagccagagttctcaagattccagtcctgttcgaaatctgcagtcttttggcactgaggagcctgcttactctaccagaagagtgacccgtagtcagcagcagcctaccccagtgacaccgaaaaaataccctcttcggcagactcgttcatctggttcagaaactgagcaagtggttgatttttcagatagagaaactaaaaatacagctgatcatgatgagtcaccgcctcgaactccaactggaaatgcgccttcttctgagtctgacatagacatctccagccccaatgtatctcacgatgagagcattgccaaggacatgtccctgaaggactcaggcagtgatctctctcatcgccccaagcgccgtcgcttccatgaaagctacaacttcaatatgaagtgtcctacaccaggctgtaactctctaggacaccttacaggaaaacatgagagacatttctccatctcaggatgcccactgtatcataacctctcagctgacgaatgcaaggtgagagcacagagccgggataagcagatagaagaaaggatgctgtctcacaggcaagatgacaacaacaggcatgcaaccaggcaccaggcaccaacggagaggcagcttcgatataaggaaaaagtggctgaactcaggaagaaaagaaattctggactgagcaaagaacagaaagagaaatatatggaacacagacagacctatgggaacacacgggaacctcttttagaaaacctgacaagcgagtatgacttggatcttttccgaagagcacaagcccgggcttcagaggatttggagaagttaaggctgcaaggccaaatcacagagggaagcaacatgattaaaacaattgcttttggccgctatgagcttgatacctggtaccattctccatatcctgaagaatatgcacggctgggacgtctctatatgtgtgaattctgtttaaaatatatgaagagccaaacgatactccgccggcacatggccaaatgtgtgtggaaacacccacctggtgatgagatatatcgcaaaggttcaatctctgtgtttgaagtggatggcaagaaaaacaagatctactgccaaaacctgtgcctgttggccaaactttttctggaccacaagacattatattatgatgtggagcccttcctgttctatgttatgacagaggcggacaacactggctgtcacctgattggatatttttctaaggaaaagaattcattcctcaactacaacgtctcctgtatccttactatgcctcagtacatgagacagggctatggcaagatgcttattgatttcagttatttgctttccaaagtcgaagaaaaagttggctccccagaacgtccactctcagatctggggcttataagctatcgcagttactggaaagaagtacttctccgctacctgcataattttcaaggcaaagagatttctatcaaagaaatcagtcaggagacggctgtgaatcctgtggacattgtcagcactctgcaagcccttcagatgctcaaatactggaagggaaaacacctagttttaaagagacaggacctgattgatgagtggatagccaaagaggccaaaaggtccaactccaataaaaccatggatcccagctgcttaaaatggacccctcccaagggcacttaaagtgacctgtcattccgagccagcgaaccccagcagtaggaatccgtaccctagggatctgtctgtcatttctctgttgctcttgtgattggcaagtacagtatcctttgggaaggccatccccctcaggactgtcctggctccgacctttgtgtacactgcagacgctggttctgaggaactgttgtttcggcctcagtgaggttgcctggatgggatctgtattagacttgagtgcaggtctctcagcactgacccaaggagttctgttatggtactgtacctgtccagtcactggttctctcctcatgtcctctcgccccatgaggttgtgttgtgtcttctaagcgtggtactagtgcttgccacctggtcaccagacctccaaatatggctgccaccaccaggacctttccagttactccttatatgtgtgttctatggaggggcagggaaaaggtggcacttgtgagtgtgtgtggattggcagggggtccattcactttgggttccatcttgctttaaatttcttcattttgattaagagacctctttttgatctgtattgggctaaccagagccaaatacttttgaagagtttcccagggactagtcatggtaatagcatataattgatctgaatgagatggagagaagaatgaaggggtggtggttctgggtttgatttgagttcacctgtgggcagtgggcagtgggcagtgtcttggtgaaagggaacggatactactttttgcctcaccgtaaagtactcactagtaaatatttccttctctctttactcccactttttacgtttgcaggtgccaaagtaatgtccacttttccctttcatgctgcatattaactggttaattatactgcagaaaccttttcacctccactagtctgatacagtacatctgtacttccatataccttgcactgattttgtctgagtgccctgggagaagtagaaaatgattgaaagtgacttccgtatctcagcccatgactcagcaaggcagaatggccacccctgccaaagtttgcttctcttttcaacagtgcctcaccctccctctaggattaaagtgcttctgcccttccacgaactcctcctccatttcctttttgggatttgtcaccatccttctattctctggtcttctatttttggtgttgttcaagtgaaggaagagatgttccctctaatttctctctagcccattataacctgctatcttggggcaacttttgatgtatgacatgtcacccttcccaacttggtctcctccaacatgctgtcttcatgtggagccctcaccacaatccctgactccggtcatttgtgcccttctcttgtcatctctgtacactacttatattcactgtgggttgggggagctaattttaagcatgttcagtggcagctcccctccagtttcagtgtcactgttaaaatttatcaaaaagcaacttcactaggggttttcttaagggataaaggccttttacagaagctaaacccttccccacatgtggtagaatgtgctcttctatatctactcctcaataaagcatgttctctgctcaaaaaaaaaaaaaaaaaaaaaaaaaaaaaaaaaaaaaaaaaaaaaa

SEQ ID NO: 80 - DNA, 2356 bp, Homo sapiens
gacacacgcgaggcgctgtcctttcagcaccacaagctcgggctgaggagggaggactcctggccgtcctcctcctcttcaaattggcttgaatcttctctgaccccccacgagtgcagcacagtctgggaagaaaggcgtaaggatggtgaagctgaacagtaaccccagcgagaagggaaccaagccgccttcagttgaggatggcttccagaccgtccctctcatcactcccttggaggttaatcacttacagctgcctgctccagaaaaggtgattgtgaagacaagaacggaatatcagccggaacagaagaacaaagggaagttccgggtgccgaaaatcgctgaatttacggtcaccatccttgtcagcctggccctagctttccttgcgtgcatcgtgttcctggtggtttacaaagccttcacctatgatcacagctgcccagagggattcgtctataagcacaaacgctgtatcccagcctccctggatgcttactactcctcccaggaccccaattccagaagccgcttctacacagtcatcagccactacagcgtggccaagcagagcactgcccgggccatcgggccgtggctgtcagcagccgctgtcatccatgagcccaagccgcccaagacccagggccactagaggcctgccccagccagaatggggggcggggtggagaggaggacccccattggctaagccaagctccagttacaagacaacactgtactcctgggatatgggggcgggggcggggcagggcagggtggggggaagaacgcaccaaaaacgtggtgtgtgctggagttgtctgaaccgatatttctttttgttccttggtattgttgattcgtcgccgagtcaggctcatgtacaaaggcatgtttcgtgttgattgttcccatgtaagatatttttaaagccactgcttattctttgttaggaaaatgtaacagcagaaaaggaaagaaacaaagaacatgaacaaaaagcattaaactggctccatcggaagacgttgaagggcagtgaagagcacagactctgtgggcttcttagataagaaaacgtagcttcagtgggggctccagggttgcagagtatgagtgacacagaccgggactattccattagcctgtggtctgcagggtaggcccgcaggaaatgaggaatggccaagctggagagaagagctgattttggcattactaagcccagaatgcacataacccatagtgaaatgtgctggcctctggtgcattttgcaagatgagcacaaactttctgggcctccatcctaggacctgggcagacccacatggcctgggctctgaatgcccaccctgcgacggtgggttctgcatcagcaaacgctgaggagtgggcagattttctttgtcttttgcttgcattttctagatccacacctggatactgcccatgttgacgagacagcagcagggggagagggagggaaggaaggtgcggctgcaagaaggaaggcacgggacaggcatgtgacactaggccacaagcgataagcacaggcacctgacttttaagtttttgtttgtttgttgtttcccaaagtgctgataacaataacaacaacaataggattccaaccaggagcctcaagtgacagccaggaagagacctgaaggttggggccaccacaatgccaaatcgtttctaaaggaagctgaaaaatgggactgtcttttgcccacttcgttgtgttaaaaggggacatttgtccaaactccccaaccgagttctagaagctcctgacaaggaggcagcatccagccttgaccaggcctcccagttccctggaaccgtatcaggcattcccctgcctctcacaaatgtttcagggaggccagttctgcagggtgtcagctccaggacccacagggccagaaccagctgggagaattggttatttgagatgtggtactgcttcctcacaagtctcccacaggccatgtaaagggtatttttttgtggcttgctgtgttgctgagatcatcgtatgcaacagctgggtaataagactagcatagctcaaactatcctgccaaacgctctcatctgatttttcctcccttctcccccaacctccaatcaccctgagtcacctgtaaattcatttgtcattcaaagcggaataacaagttgtccctagcaaaaccgctgagcgctttataattttgtggtgtatttttgtcagtaggtagcagaggcggaagtattttttggtgtaattcttgaaattttctgacaggaaacaaataaagatagatgtgtctgagaaaaaaaaaaaaaaaaaaaaaa

SEQ ID NO: 81 - DNA, 2615 bp, Homo sapiens
tcgtgacgctcgtccgcaacctctgctgtcctccgcggcgcccccttccgcctgacgcgcccccggcggcggccgcgcagccctggctcctcgcgggctcgggcggcggctgcggcggggctatggcgagcggcggtggcgggggtaacactggcgcgggtggggggccggggatgggcctgagcctgggcctgggtctgggtctgagcctaggcatgagtgaggccaccagtgaggcagaggaggaggcggccacggccgaggcggtgggacgcctggccacgacgctgtggctgcggctccgcggctgggaggcggtgctggcggcggcgcagcggttgctggtgtgggagaagccgctgcacagcctggtcacggcggccgcgctcaacggcctcttctggttgctgtcttcctcgtccctccggcccttcttcctactcagcgtctcacttttggcctattttctgctggatctctggcagcctcgctttctccctgacgtttcagcatcatccccagaggagccacactctgacagtgagggtgcggggtcaggcgcccggccgcacctgctgagtgtgcccgagttgtgcagatacctggctgagagctggctcaccttccagattcacctgcaggagctgctgcagtacaagaggcagaatccagctcagttctgcgttcgagtctgctctggctgtgctgtgttggctgtgttgggacactatgttccagggattatgatttcctacattgtcttgttgagtatcctgctgtggcccctggtggtttatcatgagctgatccagaggatgtacactcgcctggagcccctgctcatgcagctggactacagcatgaaggcagaagccaatgccctgcatcacaaacacgacaagaggaagcgtcaggggaagaatgcacccccaggaggtgatgagccactggcagagacagagagtgaaagcgaggcagagctggctggcttctccccagtggtggatgtgaagaaaacagcattggccttggccattacagactcagagctgtcagatgaggaggcttctatcttggagagtggtggcttctccgtatcccgggccacaactccgcagctgactgatgtctccggggatttggaccagcagagcctgccaagtgaaccagaggagaccctaagccgggacctaggggagggagaggagggagagctggcccctcccgaagacctactaggccgtcctcaagctctgtcaaggcaagccctggactcggaggaagaggaagaggatgtggcagctaaggaaaccttgttgcggctctcatcccccctccactttgtgaacacgcacttcaatggggcagggtccccccaagatggagtgaaatgctcccctggaggaccagtggagacactgagccccgagacagtgagtggtggcctcactgctctgcccggcaccctgtcacctccactctgccttgttggaagtgacccagccccctccccttccattctcccacctgttccccaggactcaccccagcccctgcctgcccctgaggaagaagaggcactcaccactgaggactttgagttgctggatcagggggagctggagcagctgaatgcagagctgggcttggagccagagacaccgccaaaaccccctgatgctccacccctggggcccgacatccattctctggtacagtcagaccaagaagctcaggccgtggcagagccatgagccagccgttgaggaaggagctgcaggcacagtagggcttcttggctaggagtgttgctgtttcctcctttgcctaccactctggggtggggcagtgtgtggggaagctggctgtcggatggtagctattccaccctctgcctgcctgcctgcctgctgtcctgggcatggtgcagtacctgtgcctaggattggttttaaatttgtaaataattttccatttgggttagtggatgtgaacagggctagggaagtccttcccacagcctgcgcttgcctccctgcctcatctctattctcattccactatgccccaagccctggtggtctggccctttctttttcctcctatcctcagggacctgtgctgctctgccctcatgtcccacttggttgtttagttgaggcactttataatttttctcttgtcttgtgttcctttctgctttatttccctgctgtgtcctgtccttagcagctcaaccccatcctttgccagctcctcctatcccgtgggcactggccaagctttagggaggctcctggtctgggaagtaaagagtaaacctggggcagtgggtcaggccagtagttacactcttaggtcactgtagtctgtgtaaccttcactgcatccttgccccattcagcccggcctttcatgatgcaggagagcagggatcccgcagtacatggcgccagcactggagttggtgagcatgtgctctctcttgagattaggagcttccttactgctcctctgggtgatccaagtgtagtgggaccccctactagggttaggaagtggacactaacatctgtgcaggtgttgacttgaaaaataaagtgttgattggctag

SEQ ID NO: 82 - DNA, 4889 bp, Homo sapiens
aggtatttactttttgttgaattttaagggacctcaagtgaaataataatcggtgaattcaggatcaacctttatgtccagagcgtttgttccgtcgtccatttcttgtctagagtagtggtatgagctgaaaacattgctaagtgatcaccacatattgttgatgtaagggctactggttattacaagagatttttatgactcctgctgtgggggtgccctttctacccggctgagcttggtgggagccaaggctgagtcggatgtatctttatattcccagttctcggtggaacttaaaatgctgtgagacaccagacagacagatactgtgaacttggagctctctaatgaagggataccaaagtcttgtattcaatttttttttccttaaattgtcagccgaaaatgagagcacacctattcagcaactcctggatcacttcctccgccagcttcagagaaaagatccccatggattttttgcttttcctgtcacggatgcaattgctcctggatattcaatgataataaaacatcccatggattttggcaccatgaaagacaaaattgtagctaatgaatacaagtcagttacggaatttaaggcagatttcaagctgatgtgtgataatgcaatgacatacaataggccagataccgtgtactacaagttggcgaagaagatccttcacgcaggctttaagatgatgagcaaacaggcagctcttttgggcaatgaagatacagctgttgaggaacctgtccctgaagttgtaccagtacaagtagaaactgccaagaaatccaaaaagccgagtagagaagttatcagctgcatgtttgagcctgaagggaatgcctgcagcttgacggacagtaccgcagaggagcacgtgctggcgctggtggagcacgcagctgacgaagctcgggacaggatcaaccggttcctcccaggcggcaaggtagtgctctgtggccaccgagagagggtgccacgtggccccagactctctgtgtgcctctccttctgggttggtgctgtgtgatctagcacagccaccgggatccagaggtcagcgtggggccctgacgggaggtccggatcagacacacataaggctggtctcttcagtcggggtccaggtgcctctggcagggctgccgctggtgtttcatgcatcgtggaggccacgtggtcactgacctcatttccttgatggaggccctgctgcaggctaatcctttctcttggagtgaatgctgacttctgtgtctctgtcactgggtgttgacgtgaggcaccgcccttgttattccagtgggggtgctggtgttggatccgacagatggtccataataggccaccgactgtgttcacgtggctcctgccacagatggtctttgtggtggtggggcccactcagctgaccacgctctcctttctggcaggagacgttctagacccagtgtcttcagtggaaacagagcacaggctgtctgcagtctcaggcttcctagcagccctgataagagaagtagagcaatgcaggtgacattaatccttgcaggtttcatttcacctctatatccaacattttatctcaacatgtagtctgtagaaaacgttaatttgagctttatgggtttttttcatattaagtcttcaaaatgcacatgggatgggatgtaaagaacgctgaagtgggggcatttcagaggtgtctgctgctttttgcctgtgcctgctgggaagttgcagtgctctgtgtggcttgcgtgttgcgaggttgcggtctgcgtggctcacgtgttgggaggtcgtggtctgcgtggctcacgtgttgggaagttgcagtggtctgtatggcttgcgtgttgggaggttgcagtctgtgtggcccgtgtgttgggaggttgtggtctgcgtggcttgtgtgttgggaggttgtggtttttgtggcttgcgtgttggggggttgtggtctgtgtggctcacgtgttgggaggttgtggtctgcgtggctcacgtgttgggcagttgtctgcttggctcacgtgttgggaagttgtggtctgcgtggctcatgtgttgggaagttgtttatgtggcttgtgtgctggaggttgtggcctgcgtggctcacgtgttgggcggttgtctgcttggctcatgtgttgggaagttgtggtctgcgtggcttgtgtgttgggaagttgtttatgtggcttgtgtgctggaggttgtggtctacgtggcttgcactgtagttcttttggacagccttgctctgcagtctgtgtttcagccctggaattgccacattctccaagaagccctggtttcttgactagagagccttgtgtagaagccaggacctgggttctgggtgaagccctctgcagatagagctgggagatgcctgttgtgtgtgtctgcaccacatacatggacactgtgcagagggattctgttggcacctgtgtttacatgggttgaaaactgtttttacacggaaacttccagttccctcgtgccccgtgggttccgcccacttcttccctttcagttttgtatctgcgccgtgaggacttgtctcctaatcttcgtatcaactccgtgtcccattgagctgaccttccgcctctcccccagggccctggccatcctgtgggctctgagactttgcatggatccgcggtggggagctgcccccacacaaacgtccggctcttctcaggccaggtggctgccctgacatggcatgatgtccagcgcatggacgtcacccttgcactggagcccagccaaccgctgcatgacagccctcttcccccttgaaccccaagtctgcacacaccagtgcctcctcttcctggatcctcctgatggcctgtacacagaactggggtgtgggtggtgggtttttaaatgaaaaccagtccacacatgcttgagggctggagccgcctgccgtcagggcagtgccatgctgacctgctgaccgttccattttgtcaaggctcatgagcaattttaaatgtttactcgtgggtgaaggtttttgtttcagctgtaccccctatagcagggccatggggagcctaagaggttctccttggcacctgtgcgcgctctgctgttgccggtgagtctgaaattccagggaatgccgtgaggggccctctggcgtttgttcttggacaaatgtgctttcacccccattaagccctgcttgttggtcttcatttcatttgtgctgcgctgcccctcctgagggacagacgctcaggcagtgcttccttccagatgggctatctgaagaggaacggggacgggagcctgctctacagcgtggtcaacacggccgagccggacgctgatgaggaggagacccacccggtggacttgagctcgctctccagtaagctactcccaggcttcaccacgctgggcttcaaagacgagagaagaaacaaagtcacctttctctccagtgccactactgcgctttcgatgcagaataattcagtatttggcgacttgaagtcggacgagatggagctgctctactcagcctacggagatgagacaggcgtgcagtgtgcgctgagcctgcaggagtttgtgaaggatgctgggagctacagcaagaaagtggtggacgacctcctggaccagatcacaggcggagaccactctaggacgctcttccagctgaagcagagaagaaatgttcccatgaagcctccagatgaagccaaggttggggacaccctaggagacagcagcagctctgttctggagttcatgtcgatgaagtcctatcccgacgtttctgtggatatctccatgctcagctctctggggaaggtgaagaaggagctggaccctgacgacagccatttgaacttggatgagacgacgaagctcctgcaggacctgcacgaagcacaggcggagcgcggcggctctcggccgtcgtccaacctcagctccctgtccaacgcctccgagagggaccagcaccacctgggaagcccttctcgcctgagtgtcggggagcagccagacgtcacccacgacccctatgagtttcttcagtctccagagcctgcggcctctgccaagacctaactctagaccaccttcagctcttttattttatttttttagttttattttgcacgtgtagagtttttgtcatcagacaaggactttgatcctgtcccctttggcatgcgggaagcagccgcggggaggtaatgaattgtctgtggtatcatgtcagcagagtctccaagccccacgaaccctgaggagtggagtcatacgcgaaggccatatggccatcgtgtcagcagagagagtctctgtacacagccccgtgaaccctgaggagtggagtcatacacgaagggcgtgtggccatcgtgtcagcagagagagtctctgtacacagccccgtgaaccctgaggagtggagtcatacgcgaagggtgtgtggccaggctgcagagctgcgtgccgtttgtgtccgagcatcacgtgtggctccagcccttatttctgccagtgtagacacctctgtctgccccactgtcctggggtcgctcttgggaggcacaggcatgggtgtgtctggcctcattctgtatcagtccagtgtgttcctgtcatagtttgtgtctcccaggcaggccatggtaggggcctcgcaggggccattggggagcacagggccaggctggggtgaggagagctcccctgttttctgtttaattgatgagcctgggaaaggagtgtgttctgcctgcccgttacagtggagcgttccgtgtccataaaacgttttctaactgggaaaaaaaaaaaaaaaaaaaac

SEQ ID NO: 83 - DNA, 2716 bp, Homo sapiens
agtctgcggccgccaggaagcccagattcgagtgtccggagagtaaccggaagtgctgtccccaggcctaggggcggcgccggcggctgccagggagaggcaagaattgagtgttgtgaatagttctgaactagagaccttttgaaaccaaaaggaagatggtcttgagtctttcttgttacgaatgctatcttctttgagaagtcaaattgtcaggatcaggaatgtatgttttcttccatctggattctagggttggaaataccaagtaaggaattaacatatatgatgctggaaacttgtagaggctcatgattgaaaggcctgaaacagatgtatcttccaagttcttatcaagaaaatgactgtgagggcaacgatgggtcaagaagaccagcggaaaactccctaggagagagccatagaaaatgtacacttcagaagagaaatgtaatcagagaactcaaaaaaggaaaatatataatgtatgccctcggaagggtaaaaagatttttattcatatgcatgagattattcagatagatggtcatatataccagtgccttgaatgcaagcaaaacttctgtgaaaacttagctcttattatgtgtgagagaacccatactggggagaaaccttataaatgtgatatgtgtgagaaaacctttgtccaaagctcagatcttacttcacaccagaggatccacaattacgagaaaccttataaatgtagcaaatgtgagaagagcttttggcatcacttagcgctttcaggacatcagagaacacatgcaggtaaaaaattctatacatgtgacatttgtggcaagaattttggtcagagttctgatctgcttgtccaccagcgaagccatactggcgagaaaccatatctatgtagtgagtgtgacaaatgcttcagtagaagtacaaacctcataaggcatcgaagaactcacacaggtgagaaaccatttaagtgtctcgagtgtgaaaaagcttttagtgggaaatcagatcttattagccaccagagaactcacactggggaaaggccctacaaatgtaataagtgtgagaaaagttaccgacaccgttcagccttcattgtacataaaagagttcatactggggagaagccctataagtgtggtgcctgtgaaaaatgctttggccagaaatcagaccttatcgtgcaccagagagtccacacaggtgagaagccgtataaatgcctggaatgtatgagaagttttactcggagtgccaacctaattaggcaccaggcaactcacactcacacttttaaatgccttgaatatgaaaaaagctttaactgtagctcagatcttattgtacatcagagaattcacatggaagagaaaccacatcagtggtctgcgtgtgagagtggcttcctcctaggaatggactttgttgcccaacagaaaatgagaactcaaacagaggagctacactataaatacactgtatgtgataaaagcttccaccagagttcagcccttcttcaacatcagacagtacacattggtgaaaaaccgtttgtctgtaatgtgagtgaaaaaggtcttgagcttagccctccccatgcgtcagaagcctcacagatgtcttgaccaggcgagaagctgtaataccaatattaaaaattatttatgtatcagagaactcattaagatgaggacaaatctcagactttgctcagagctcagaattcagtggggaccagagagcctgcaattggaaatatgagaaattctttgcccagagagctgccctaacagaacacttcatcctcactccaacgagaaatctacagatgcccagaggttttgaaaacttaccgtctgagctcaaatttgatcactcacaagaggattcatacaagtgggaaaccttagaaatgcactgagtgtgagagagctttctactaatgctcagcccttctcgttgtaagagaattcacaccggagaacaactttttaaatgccttcagtgtcagttgtgctgcagacagtatgaacatctcattggacctcagaaaacccaccctggggagaagccccagcaagtgtgaaaaaagcttctaacaaaactctgacttacccatcagagaagccatactggtgaaaaattgtatatttgtcttaagtatggcaaaagcattcgttggagagccttacttgggtttgcacccaaaaaaaaaaacccaatctgaggaaagactgcaagtgtctgaatgaagagtgcttgtcaatgatcaactcttgtggtacatcagggaactcacataggtgaaaaaacccatacttaccttgagtctgagaaaacctttggtagaagctcctgtcttatcaggccccaaaaaacctgttctgcagtgagagatttaattgtgggtgagaatctatgtacatataatatgtatgagaagactgttctcatagttagttgactcatatggtagagaggactttacatgaaatcagtatgaaaatagttttttagatacccagaagcttgttctgggagaagctagggtgggtcagagtagacctgatgggtaactcaggtaaagatgcttttcttttatctgaactacttaatgattgctttacttttactttttaaaaaattcagaaatccaataaaggaaaggacggtaaccttaaaaaaaaaaaaaaaaaaaaaaaaa

SEQ ID NO: 84 - DNA, 1452 bp, Homo sapiens
cactttcttgctcctgcctccctacctggcacccaggccggccctggtaccctggtactgaataaaggcacacgtctaaatgatgtcggggggaatctgcccagtgttggcactggagcgaacacgacccactgccagcatggcccacgagccacacccccccaagccagcacctcctccccagaggaagcacggggctcgacggggcacgcccctgaatgggaggtcacacatggtgagggctcccttgttcccagaggtctagctgtctccctgctaagatgcagagctcactatgggcctcgcagggggttaagccgagtcatttcatcttcacagcagctgtaggtcccgctgacatagctgacacatagagagctaaagtgacctgtgcaaggtcacaggctaggagtagcagcacggggcccagcacgaggaacagccttagcatcccccgcctccccaaccctgcagcctgccctgactccaatcccaggggaattcctgagctgcaggcaaaggctgaagcaggagctgacaagccctgctgagcccagagaggtctgggcggtcccaggagggcgtctccctagggctttgatgagttggtggccgcccaggcacctctgcctgcctgcccagcatggcaggtgtgtgggctggagcttctgcccagccctgccccacagccacaattaggggacgagtgcagataaagcacgggggccagttacatctgaatttcagataaacaatgaattgttattttagtacagtatgaaagtatttggccccaaagaactggaagcaggaaaaggaacagctcctcatacacccatgctcacagcattattcaccagagccggaaggtagaaacgatgtctctccacagtcgaatagattgtttccacaaactgtctgtaggtgcatacaatggaataggattaatccgtgaaaaggaagaaattctgacacatgctccggcgtggaggaaccttgaggacgacgctgagtgaaagaagccagacacgaaaggacagatacggcaagactcgacttatgtgaggtccctagaggagtcggattcatagagactggaagaattcgcgggccgcaggggcggtggagaggggaaatggggagttactgtttaatggggacagagtttcagttttacaagatgaaaagggtcctggagctggatgggggtgacggccgcacaacagcatgaatggactgaacgccactgaaaactgaactcttgaaaatggttaaactggcatattttgttatgcatattttgccacaaaaagcaaacaactcttctccccaaaaatatctggggtgtacttacactaaatatgtagggcatatttactctcaacatttatttccttatttgaaattaaagtatttgggacacactgcactacaaaaaaaaaaaaaaaaaaa

SEQ ID NO: 85 - DNA, 1884 bp, Homo sapiens
gacgtgaacggtcgttgcagagattgcgggcggctgagacgccgcctgcctggcacctaggagcgcagcggagccccgacaccgccgccgccgccatggagtccgagaccgaacccgagcccgtcacgctcctggtgaagagccccaaccagcgccaccgcgacttggagctgagtggcgaccgcggctggagtgtgggccacctcaaggcccacctgagccgcgtctaccccgagcgtccgcgtccagaggaccagaggttaatttattctgggaagctgttgttggatcaccaatgtctcagggacttgcttccaaagcaggaaaaacggcatgttttgcatctggtgtgcaatgtgaagagtccttcaaaaatgccagaaatcaacgccaaggtggctgaatccacagaggagcctgctggttctaatcggggacagtatcctgaggattcctcaagtgatggtttaaggcaaagggaagttcttcggaacctttcttcccctggatgggaaaacatctcaaggcctgaagctgcccagcaggcattccaaggcctgggtcctggtttctccggttacacaccctatgggtggcttcagctttcctggttccagcagatatatgcacgacagtactacatgcaatatttagcagccactgctgcatcaggggcttttgttccaccaccaagtgcacaagagatacctgtggtctctgcacctgctccagcccctattcacaaccagtttccagctgaaaaccagcctgccaatcagaatgctgctcctcaagtggttgttaatcctggagccaatcaaaatttgcggatgaatgcacaaggtggccctattgtggaagaagatgatgaaataaatcgagattggttggattggacctattcagcagctacattttctgtttttctcagtatcctctacttctactcctccctgagcagattcctcatggtcatgggggccaccgttgttatgtacctgcatcacgttgggtggtttccatttagaccgaggccggttcagaacttcccaaatgatggtcctcctcctgacgttgtaaatcaggaccccaacaataacttacaggaaggcactgatcctgaaactgaagaccccaaccacctccctccagacagggatgtactagatggcgagcagaccagcccctcctttatgagcacagcatggcttgtcttcaagactttctttgcctctcttcttccagaaggccccccagccatcgcaaactgatggtgtttgtgctgtagctgttggaggctttgacaggaatggactggatcacctgactccagctagattgcctctcctggacatggcaatgatgagtttttaaaaaacagtgtggatgatgatatgcttttgtgagcaagcaaaagcagaaacgtgaagccgtgatacaaattggtgaacaaaaaatgcccaaggcttctcatgtctttattctgaagagctttaatatatactctatgtagtttaataagcactgtacgtagaaggccttaggtgttgcatgtctatgcttgaggaacttttccaaatgtgtgtgtctgcatgtgtgtttgtacatagaagtcatagatgcagaagtggttctgctggtacgatttgattcctgttggaatgtttaaattacactaagtgtactactttatataatcaatgaaattgctagacatgttttagcaggacttttctaggaaagacttatgtataattgctttttaaaatgcagtgctttactttaaactaaggggaactttgcggaggtgaaaacctttgctgggttttctgttcaataaagttttactatgaatgaccctgaaaaaaaaaaaaaaaaaaaaaa

SEQ ID NO: 86 - DNA, 1203 bp, Homo sapiens
gtcgtcacgcgtcccgcgcctcctcgcgcctgcaccgtggttggaaggtcgtcccctgtgaccggttgggcggttggagcggctgtcgccatgttgtcggtagcagcccgctcgggcccgttcgcgcccgtcctgtcggccacgtcccgcggggtggcgggcgcgctgcggcccttggtgcaggccacggtgcccgccaccccggagcagcctgtgttggacctgaagcggcccttcctcagccgggagtcgctgagcggccaggccgtgcgccggcctttggtcgcctccgtgggcctcaatgtccctgcttctgtttgttattcccacacagacatcaaggtgcctgacttctctgaataccgccgccttgaagttttagatagtacgaagtcttcaagagaaagcagcgaggctaggaaaggtttctcctatttggtaactggagtaactactgtgggtgtcgcatatgctgccaagaatgccgtcacccagttcgtttccagcatgagtgcttctgctgatgtgttggccctggcgaaaatcgaaatcaagttatccgatattccagaaggcaagaacatggctttcaaatggagaggcaaacccctgtttgtgcgtcatagaacccagaaggaaattgagcaggaagctgcagttgaattatcacagttgagggacccacagcatgatctagatcgagtaaagaaacctgaatgggttatcctgataggtgtttgcactcatcttggctgtgtacccattgcaaatgcaggagattttggtggttattactgcccttgccatgggtcacactatgatgcatctggcaggatcagattgggtcctgctcctctcaaccttgaagtccccacgtatgagttcaccagtgacgatatggtgattgttggttaagagacttggactcaagtcataggcttctttcagtctttatgtcacctcaggagacttatttgagaggaagccttctgtacttgaagttgatttgaaatatgtaagaattgatgatgtatttgcaaacattaatgtgaaataaattgaatttaatgttgaatactttcaggcattcacttaataaagacactgttaagcactgttatgctcagtcatacacgcgaaaggtacaatgtcttttagctaattctaattaaaaattacagactggtgtacaagatacttgtg

SEQ ID NO: 87 - DNA, 1416 bp, Homo sapiens
acgggctatttaaaggtacgcgccgcggccaaggccgcaccgtactgggcgggggtctggggagcgcagcagccatggcaagccgtctcctgctcaacaacggcgccaagatgcccatcctggggttgggtacctggaagtcccctccagggcaggtgactgaggccgtgaaggtggccattgacgtcgggtaccgccacatcgactgtgcccatgtgtaccagaatgagaatgaggtgggggtggccattcaggagaagctcagggagcaggtggtgaagcgtgaggagctcttcatcgtcagcaagctgtggtgcacgtaccatgagaagggcctggtgaaaggagcctgccagaagacactcagcgacctgaagctggactacctggacctctaccttattcactggccgactggctttaagcctgggaaggaatttttcccattggatgagtcgggcaatgtggttcccagtgacaccaacattctggacacgtgggcggccatggaagagctggtggatgaagggctggtgaaagctattggcatctccaacttcaaccatctccaggtggagatgatcttaaacaaacctggcttgaagtataagcctgcagttaaccagattgagtgccacccatatctcactcaggagaagttaatccagtactgccagtccaaaggcatcgtggtgaccgcctacagccccctcggctctcctgacaggccctgggccaagcccgaggacccttctctcctggaggatcccaggatcaaggcgatcgcagccaagcacaataaaactacagcccaggtcctgatccggttccccatgcagaggaacttggtggtgatccccaagtctgtgacaccagaacgcattgctgagaactttaaggtctttgactttgaactgagcagccaggatatgaccaccttactcagctacaacaggaactggagggtctgtgccttgttgagctgtacctcccacaaggattaccccttccatgaagagttttgaagctgtggttgcctgctcgtccccaagtgacctatacctgtgtttcttgcctcatttttttccttgcaaatgtagtatggcctgtgtcactcagcagtgggacagcaacctgtagagtggccagcgagggcgtgtctagcttgatgttggatctcaagagccctgtcagtagagtagaagtctcttccagtttgctttgcccttctttctaccctgctggggaaagtacaacctgaatacccttttctgaccaaagagaagcaaaatctaccaggtcaaaatagtgccactaacggttgagttttgactgcttggaactggaatcctttcagcaagacttctctttgcctcaaataaaaagtgcttttgtgagaaaaaaaaaaaaaaaaaa

SEQ ID NO: 88 - DNA, 817 bp, Homo sapiens
gaaccgtttactcgctgctgtgcccatctatcagcaggctccgggctgaagattgcttctcttctctcctccaaggtctagtgacggagcccgcgcgcggcgccaccatgcggcagaaggcggtatcgcttttcttgtgctacctgctgctcttcacttgcagtggggtggaggcaggtaagaaaaagtgctcggagagctcggacagcggctccgggttctggaaggccctgaccttcatggccgtcggaggaggactcgcagtcgccgggctgcccgcgctgggcttcaccggcgccggcatcgcggccaactcggtggctgcctcgctgatgagctggtctgcgatcctgaatgggggcggcgtgcccgccggggggctagtggccacgctgcagagcctcggggctggtggcagcagcgtcgtcataggtaatattggtgccctgatgggctacgccacccacaagtatctcgatagtgaggaggatgaggagtagccagcagctcccagaacctcttcttccttcttggcctaactcttccagttaggatctagaactttgcctttttttttttttttttttttttttgagatgggttctcactatattgtccaggctagagtgcagtggctattcacagatgcgaacatagtacactgcagcctccaactcctagcctcaagtgatcctcctgtctcaacctcccaagtaggattacaagcatgcgccgacgatgcccagaatccagaactttgtctatcactctccccaacaacctagatgtgaaaacagaataaacttcacccagaaaa

SEQ ID NO: 89 - DNA, 716 bp, Homo sapiens
atggcagagcagtcggacgaggccgtgaagtactacaccctagaggagattcagaagcacaaccacagcaagagcacctggctgatcctgcaccacaaggtgtacgatttgaccaaatttctggaagagcatcctggtggggaagaagttttaagggaacaagctggaggtgacgctactgagaactttgaggatgtcgggcactctacagatgccagggaaatgtccaaaacattcatcattggggagctccatccagatgacagaccaaagttaaacaagcctccagaaccttaaaggcggtgtttcaaggaaactcttatcactactattgattctagttccagttggtggaccaactgggtgatccctgccatctctgcagtggccgtcgccttgatgtatcgcctatacatggcagaggactgaacacctcctcagaagtcagcgcaggaagagcctgctttggacacgggagaaaagaagccattgctaactacttcaactgacagaaaccttcacttgaaaacaatgattttaatatatctctttctttttcttccgacattagaaacaaaacaaaaagaactgtcctttctgcgctcaaatttttcgagtgtgcctttttattcatctactttattttgatgtttccttaatgtgtaatttacttattataagcatgatcttttaaaaatatatttggcttttaaagt

SEQ ID NO: 90 - DNA, 6906 bp, Homo sapiens
ggcgcgggcggcctggagccccgggagcggcgcgcgcggtcccggcccagccggctctcctggcctcgcgctgcacattctctcctggcggcggcgccacctgcagtagcgttcgcccgaacatggcgacacggagcagcaggagggagtcgcgactcccgttcctattcaccctggtcgcactgctgccgcccggagctctctgcgaagtctggacgcagaggctgcacggcggcagcgcgcccttgccccaggaccggggcttcctcgtggtgcagggcgacccgcgcgagctgcggctgtgggcgcgcggggatgccaggggggcgagccgcgcggacgagaagccgctccggaggaaacggagcgctgccctgcagcccgagcccatcaaggtgtacggacaggttagtctgaatgattcccacaatcagatggtggtgcactgggctggagagaaaagcaacgtgatcgtggccttggcccgagatagcctggcattggcgaggcccaagagcagtgatgtgtacgtgtcttacgactatggaaaatcattcaagaaaatttcagacaagttaaactttggcttgggaaataggagtgaagctgttatcgcccagttctaccacagccctgcggacaacaagcggtacatctttgcagacgcttatgcccagtacctctggatcacgtttgacttctgcaacactcttcaaggcttttccatcccatttcgggcagctgatctcctcctacacagtaaggcctccaaccttctcttgggctttgacaggtcccaccccaacaagcagctgtggaagtcagatgactttggccagacctggatcatgattcaggaacatgtcaagtccttttcttggggaattgatccctatgacaaaccaaataccatctacattgaacgacacgaaccctctggctactccactgtcttccgaagtacagatttcttccagtcccgggaaaaccaggaagtgatccttgaggaagtgagagattttcagcttcgggacaagtacatgtttgctacaaaggtggtgcatctcttgggcagtgaacagcagtcttctgtccagctctgggtctcctttggccggaagcccatgagagcagcccagtttgtcacaagacatcctattaatgaatattacatcgcagatgcctccgaggaccaggtgtttgtgtgtgtcagccacagtaacaaccgcaccaatttatacatctcagaggcagaggggctgaagttctccctgtccttggagaacgtgctctattacagcccaggaggggccggcagtgacaccttggtgaggtattttgcaaatgaaccatttgctgacttccaccgagtggaaggattgcaaggagtctacattgctactctgattaatggttctatgaatgaggagaacatgagatcggtcatcacctttgacaaagggggaacctgggagtttcttcaggctccagccttcacgggatatggagagaaaatcaattgtgagctttcccagggctgttcccttcatctggctcagcgcctcagtcagctcctcaacctccagctccggagaatgcccatcctgtccaaggagtcggctccaggcctcatcatcgccactggctcagtgggaaagaacttggctagcaagacaaacgtgtacatctctagcagtgctggagccaggtggcgagaggcacttcctggacctcactactacacatggggagaccacggcggaatcatcacggccattgcccagggcatggaaaccaacgagctaaaatacagtaccaatgaaggggagacctggaaaacattcatcttctctgagaagccagtgtttgtgtatggcctcctcacagaacctggggagaagagcactgtcttcaccatctttggctcgaacaaagagaatgtccacagctggctgatcctccaggtcaatgccacggatgccttgggagttccctgcacagagaatgactacaagctgtggtcaccatctgatgagcgggggaatgagtgtttgctgggacacaagactgttttcaaacggcggaccccccatgccacatgcttcaatggagaggactttgacaggccggtggtcgtgtccaactgctcctgcacccgggaggactatgagtgtgacttcggtttcaagatgagtgaagatttgtcattagaggtttgtgttccagatccggaattttctggaaagtcatactcccctcctgtgccttgccctgtgggttctacttacaggagaacgagaggctaccggaagatttctggggacacttgtagcggaggagatgttgaagcgcgactggaaggagagctggtcccctgtcccctggcagaagagaacgagttcattctgtatgctgtgaggaaatccatctaccgctatgacctggcctcgggagccaccgagcagttgcctctcaccgggctacgggcagcagtggccctggactttgactatgagcacaactgtttgtattggtccgacctggccttggacgtcatccagcgcctctgtttgaatggaagcacagggcaagaggtgatcatcaattctggcctggagacagtagaagctttggcttttgaacccctcagccagctgctttactgggtagatgcaggcttcaaaaagattgaggtagctaatccagatggcgacttccgactcacaatcgtcaattcctctgtgcttgatcgtcccagggctctggtcctcgtgccccaagagggggtgatgttctggacagactggggagacctgaagcctgggatttatcggagcaatatggatggttctgctgcctatcacctggtgtctgaggatgtgaagtggcccaatggcatctctgtggacgaccagtggatttactggacggatgcctacctggagtgcatagagcggatcacgttcagtggccagcagcgctctgtcattctggacaacctcccgcacccctatgccattgctgtctttaagaatgaaatctactgggatgactggtcacagctcagcatattccgagcttccaaatacagtgggtcccagatggagattctggcaaaccagctcacggggctcatggacatgaagattttctacaaggggaagaacactggaagcaatgcctgtgtgcccaggccatgcagcctgctgtgcctgcccaaggccaacaacagtagaagctgcaggtgtccagaggatgtgtccagcagtgtgcttccatcaggggacctgatgtgtgactgccctcagggctatcagctcaagaacaatacctgtgtcaaagaagagaacacctgtcttcgcaaccagtatcgctgcagcaacgggaactgtatcaacagcatttggtggtgtgactttgacaacgactgtggagacatgagcgatgagagaaactgccctaccaccatctgtgacctggacacccagtttcgttgccaggagtctgggacttgtatcccactgtcctataaatgtgaccttgaggatgactgtggagacaacagtgatgaaagtcattgtgaaatgcaccagtgccggagtgacgagtacaactgcagttccggcatgtgcatccgctcctcctgggtatgtgacggggacaacgactgcagggactggtctgatgaagccaactgtaccgccatctatcacacctgtgaggcctccaacttccagtgccgaaacgggcactgcatcccccagcggtgggcgtgtgacggggatacggactgccaggatggttccgatgaggatccagtcaactgtgagaagaagtgcaatggattccgctgcccaaacggcacttgcatcccatccagcaaacattgtgatggtctgcgtgattgctctgatggctccgatgaacagcactgcgagcccctctgtacgcacttcatggactttgtgtgtaagaaccgccagcagtgcctgttccactccatggtctgtgacggaatcatccagtgccgcgacgggtccgatgaggatgcggcgtttgcaggatgctcccaagatcctgagttccacaaggtatgtgatgagttcggtttccagtgtcagaatggagtgtgcatcagtttgatttggaagtgcgacgggatggatgattgcggcgattattctgatgaagccaactgcgaaaaccccacagaagccccaaactgctcccgctacttccagtttcggtgtgagaatggccactgcatccccaacagatggaaatgtgacagggagaacgactgtggggactggtctgatgagaaggattgtggagattcacatattcttcccttctcgactcctgggccctccacgtgtctgcccaattactaccgctgcagcagtgggacctgcgtgatggacacctgggtgtgcgacgggtaccgagattgtgcagatggctctgacgaggaagcctgccccttgcttgcaaacgtcactgctgcctccactcccacccaacttgggcgatgtgaccgatttgagttcgaatgccaccaaccgaagacgtgtattcccaactggaagcgctgtgacggccaccaagattgccaggatggccgggacgaggccaattgccccacacacagcaccttgacttgcatgagcagggagttccagtgcgaggacggggaggcctgcattgtgctctcggagcgctgcgacggcttcctggactgctcggacgagagcgatgaaaaggcctgcagtgatgagttgactgtgtacaaagtacagaatcttcagtggacagctgacttctctggggatgtgactttgacctggatgaggcccaaaaaaatgccctctgcttcttgtgtatataatgtctactacagggtggttggagagagcatatggaagactctggagacccacagcaataagacaaacactgtattaaaagtcttgaaaccagataccacgtatcaggttaaagtacaggttcagtgtctcagcaaggcacacaacaccaatgactttgtgaccctgaggaccccagagggattgccagatgcccctcgaaatctccagctgtcactccccagggaagcagaaggtgtgattgtaggccactgggctcctcccatccacacccatggcctcatccgtgagtacattgtagaatacagcaggagtggttccaagatgtgggcctcccagagggctgctagtaactttacagaaatcaagaacttattggtcaacactctatacaccgtcagagtggctgcggtgactagtcgtggaataggaaactggagcgattctaaatccattaccaccataaaaggaaaagtgatcccaccaccagatatccacattgacagctatggtgaaaattatctaagcttcaccctgaccatggagagtgatatcaaggtgaatggctatgtggtgaaccttttctgggcatttgacacccacaagcaagagaggagaactttgaacttccgaggaagcatattgtcacacaaagttggcaatctgacagctcatacatcctatgagatttctgcctgggccaagactgacttgggggatagccctctggcatttgagcatgttatgaccagaggggttcgcccacctgcacctagcctcaaggccaaagccatcaaccagactgcagtggaatgtacctggaccggcccccggaatgtggtttatggtattttctatgccacgtcctttcttgacctctatcgcaacccgaagagcttgactacttcactccacaacaagacggtcattgtcagtaaggatgagcagtatttgtttctggtccgtgtagtggtaccctaccaggggccatcctctgactacgttgtagtgaagatgatcccggacagcaggcttccaccccgtcacctgcatgtggttcatacgggcaaaacctccgtggtcatcaagtgggaatcaccgtatgactctcctgaccaggacttgttgtatgcaattgcagtcaaagatctcataagaaagactgacaggagctacaaagtaaaatcccgtaacagcactgtggaatacacccttaacaagttggagcctggcgggaaataccacatcattgtccaactggggaacatgagcaaagattccagcataaaaattaccacagtttcattatcagcacctgatgccttaaaaatcataacagaaaatgatcatgttcttctgttttggaaaagcctggctttaaaggaaaagcattttaatgaaagcaggggctatgagatacacatgtttgatagtgccatgaatatcacagcttaccttgggaatactactgacaatttctttaaaatttccaacctgaagatgggtcataattacacgttcaccgtccaagcaagatgcctttttggcaaccagatctgtggggagcctgccatcctgctgtacgatgagctggggtctggtgcagatgcatctgcaacgcaggctgccagatctacggatgttgctgctgtggtggtgcccatcttattcctgatactgctgagcctgggggtggggtttgccatcctgtacacgaagcaccggaggctgcagagcagcttcaccgccttcgccaacagccactacagctccaggctggggtccgcaatcttctcctctggggatgacctgggggaagatgatgaagatgcccctatgataactggattttcagatgacgtccccatggtgatagcctgaaagagctttcctcactagaaaccaaatggtgtaaatattttatttgataaagatagttgatggtttattttaaaagatgcactttgagttgcaatatgttatttttatatgggccaaaaacaaaaaacaaaaaaaaaaa

SEQ ID NO: 91 - DNA, 620 bp, Homo sapiens
ttttaacaggaccagtaacaacactcgaataagccattggtttggtgtaagttaaccaaataattctttagggtgtgtgatatggtttggatttgtgtccccgtccaaatctcatgtcaaattgtaattcccagtgttggacgaggggcctggtgggaggcaattggatcatgaaggtgaatttccccctggctgttgtcatggtagtgtgtgagtgctcacgagatctggttgtttaaaagtgtgtagcacctcatgcttccctttcttcctccttctccagccaagtaagatgttccagcttgcccttcgccttctgacatgattgtgagcttcctgaggcctccccctcagcatgcttcctgtacagcctgaagaaccatgagccaattaaacctattttctttataaattgcccagtctcaggtagttctttattgcaatgtgagaatggactaatacactgtggtttagtcattctaccagcccaggagcttggtgataataaagagtataataatttaaagacctctgtagggttttaaagagcccctaaattagccccgtagaaaccaaatggcttatctactggattttacatgttctggaatcccaaaggt

SEQ ID NO: 92 - DNA, 944 bp, Homo sapiens
ttcggcacgaggcttcctcttctctactccttgtgcaaacccatctctggatagctagaaaaggaacttcagaatggactatatgtgatgaccacctgtatgcactctaggctcttatctgtctctattttatgtggtgactatatctcagaagtactaccccttctgagtagtactattatttcctatgccaattttttttaagtctctgatgctgccctttttaaatttttgtcttattttttagcctctttagtattagggggtgaggtgacattcctagactctacagtagcagtttggcatgttagtgacaggaaattgtgattccctatctccccctcctcctaccttttctgcttttgtgattccattgttcctatctcattgaggctttcccaggcattcgaatttagttagtaggtcatttctaatctctgggccttgtcttttctctctccgttcccctccttccctaccacatattttttgtttattctgaggtggtttgtttctgaaagttaatctaggtcaccttctatatcctgtgctttctagttggctttagacatcttgttctagcaacaatgatggtagcagctctctccctttccccatgtgctctccttctgtcaaggccatttgtgtgtgtactgcggcaggtgtgtgtgtggggggatgcgcccagactgttctcacaatgtcctcagtttttcaggttgtctgacagctttatgtacagcgtatttttagaaaaacttaaatatacttctttatttagggttttattctgatgagcaagtttgtgtgtatatgtgtgtatgagcatttgtatgtatatatacttatacagatctatattatatatacagtttttgtactatcatttaaaataaaaatgtttctcaataaaatgtcaaagccgaaaaaaaaaaaaaaaaaaa

SEQ ID NO: 93 - DNA, 1258 bp, Homo sapiens
gacataaaaaccgggtgccggcaggcgccagtcgcaggtgtgctgctgaggcgtgagaatggcgtcccgcggccggcgtccggagcatggcggacccccagagctgttttatgacgagacagaagcccggaaatacgttcgcaactcacggatgattgatatccagaccaggatggctgggcgagcattggagcttctttatctgccagagaataagccctgttacctgctggatattggctgtggcactgggctgagtggaagttatctgtcagatgaagggcactattgggtgggcctggatatcagccctgccatgctggatgaggctgtggaccgagagatagagggagacctgctgctgggggatatgggccagggcatcccattcaagccaggcacatttgatggttgcatcagcatttctgctgtgcagtggctctgtaatgctaacaagaagtctgaaaaccctgccaagcgcctgtactgcttttttgcttctcttttttctgttctcgtccggggatcccgagctgtcctgcagctgtaccctgagaactcagagcagttggagctgatcacaacccaggccacaaaggcaggcttctccggtggcatggtggtagactaccctaacagtgccaaagcaaagaaattctacctctgcttgttttctgggccttcgacctttataccagaggggctgagtgaaaatcaggatgaagttgaacccagggagtctgtgttcaccaatgagaggttcccattaaggatgtcgaggcggggaatggtgaggaagagtcgggcatgggtgctggagaagaaggagcggcacaggcgccagggcagggaagtcagacctgacacccagtacaccggccgcaagcgcaagccccgcttctaagtcaccacgcggttctggaaaggcacttgcctctgcacttttctatattgttcagctgacaaagtagtattttagaaaagttctaaagttataaaaatgttttctgcagtaaaaaaaaagttctctgggccgggcgtggtggctcacacctgtaatcccagcaccttgggaggctgaggtgggaggatcatttgaggccaggagtttgagacctgcctgggcaacataatgaaacttcctttccagggaggaaaaaaaaaaaaaaaaaaagctctgagagcatcttattttgtttaaaggcaagaaataaaatttccttttgtggaaaaaaaaaaaaaaaaaaaaaaaaaaaaa

SEQ ID NO: 94 - DNA, 288 bp, Homo sapiens
  misc_feature (111)..(111): n is a, c, g, or t
  misc_feature (191)..(191): n is a, c, g, or t
  misc_feature (233)..(233): n is a, c, g, or t
  misc_feature (246)..(246): n is a, c, g, or t
  misc_feature (254)..(254): n is a, c, g, or t
taagccaagagtaaaatcttcccgttctgaaaataatagtggcataacacaatactcctggactgtgggaaataaaatggagagggacatgattagaaggaaacttctagnaattctactaattccacgttcctcaaattggtacaactggtgacaatctcagagtcacctgtcatcgcatcaaagtttgnacagagaaggatgacccacaggagcagccttgctgtgcttgnaggaattgtttgnacacttgnaaatgagcttcggatcagttcttggctgaagtcc

SEQ ID NO: 95 - DNA, 2693 bp, Homo sapiens
ggagagaaatggctgaaagtggaaacccggagcggtttggggcgcttcgcaaagttctccagctcggcgagccggcggtgtgtctaccagaggctgggggccagtccatctggtcctgcccgacgccacttccaccccgcgagctctgggaaaggtctctacgtgacgccaagggccgtcgcggccccggggagagggatcgaaagactcactctgcgaggtgtttacactggaggtgggggacgggaagggactgggcaaagttacctggactcaactaaattcctgcgcttgcttagtgttgacatttgaataggatccgagatgttctgcttttatcccgggcagccctgatatgtcagcaacaggctgaggttccagacctgaaatcgcactgcaagaaaaaggggtttgctgaactaactccaagctggtgtgcctagcgtccgcgcggctgccggcccaagagctggagtcaccatggcggccggagttgcggcctggctgccttttgcccgggctgcggccatcgggtggatgccggtggccaactgccccatgcccctggccccggccgacaagaacaagcggcaggatgagctgattgtcctcaacgtgagtgggcggaggttccagacctggaggaccacgctggagcgctacccggacaccctgctgggcagcacggagaaggagttcttcttcaacgaggacaccaaggagtacttcttcgaccgggaccccgaggtgttccgctgcgtgctcaacttctaccgcacggggaagctgcactacccgcgctacgagtgcatctctgcctacgacgacgagctggccttctacggcatcctcccggagatcatcggggactgctgctacgaggagtacaaggaccgcaagagggagaacgccgagcggctcatggacgacaacgactcggagaacaaccaggagtccatgccctcgctcagcttccgccagaccatgtggcgggccttcgagaacccccacaccagcacgctggccctggtcttctactacgtgactggcttcttcatcgctgtctcggtcatcaccaacgtggtggagacggtgccgtgcggcacggtcccgggcagcaaggagctgccgtgcggggagcgctactcggtggccttcttctgcctggacacggcgtgcgtcatgatcttcaccgtggagtacctcctgcggctcttcgcggctcccagccgctaccgcttcatccgcagcgtcatgagcatcatcgacgtggtggccatcatgccctactacatcggtctggtcatgaccaacaacgaggacgtgtccggcgccttcgtcacgctccgggtcttccgcgtcttcaggatcttcaagttttcccgccactcccagggcctgcggatcctgggctacacactgaagagctgtgcctccgaactgggctttcttctcttctccctcaccatggccatcatcatctttgccactgtgatgttttatgccgagaagggctcctcggccagcaagttcacaagcatccctgcctcgttttggtacaccattgtcaccatgaccacactggggtacggagacatggtgcctaagacgattgcagggaagatcttcggctccatctgctccttgagtggcgtcctggtcattgccctgccagtccctgtgattgtttccaactttagccggatttaccaccagaatcagagagctgataaacgcagggcacaaaagaaggcccgccttgccaggatccgtgtggccaaaacaggcagttcgaatgcatacctgcacagcaagcgcaacgggctcctcaacgaggcgctggagctgacgggcaccccagaagaggagcacatgggcaagaccacctcactcatcgagagccagcatcatcacctgctgcactgcctggaaaaaaccactgggttgtcctatcttgtggatgatcccctgttatctgtacgaacctccaccatcaagaaccacgagtttattgatgagcagatgtttgagcagaactgcatggagagttcaatgcagaactacccatccacaagaagtccctcactgtccagccacccaggcctcactaccacctgctgctcccgtcgtagtaagaagaccacacacctgcccaattctaacctgccagctactcgcctgcgcagcatgcaagagctcagcacgatccacatccagggcagtgagcagccctccctcacaaccagtcgctccagccttaatttgaaagcagacgacggactgagaccaaactgcaaaacatcccagatcaccacagccatcatcagcatccccactcccccagcgctaaccccagagggggaaagtcggccaccccctgccagcccaggccccaacacgaacattccttccatagccagcaatgttgtcaaggtctccgccttgtaaaaccactggacagagggccagagtgggtagtggggaatgaaggggactggcatgttggtgggtggtcactgagaccactccctcccccctttccccactatttctgcctgccccattgtacccctagcactgagacttgtgcctggaaggaaaaagaggtagcaaaggggcacctgaggttcacgctgctagcgtggacatagccctgtgatactgcatctcactggggccagaggaagggaggg

SEQ ID NO: 96 - DNA, 2075 bp, Homo sapiens
gccataaaggccgccgcgcgcccacgcgcctcgcttgctgcgcgctgccggcgctccttcctcctcggctcgcgtctcactcagtgtaccttctagtcccgccatggccgctctcacccgggacccccagttccagaagctgcagcaatggtaccgcgagcaccgctccgagctgaacctgcgccgcctcttcgatgccaacaaggaccgcttcaaccacttcagcttgaccctcaacaccaaccatgggcatatcctggtggattactccaagaacctggtgacggaggacgtgatgcggatgctggtggacttggccaagtccaggggcgtggaggccgcccgggagcggatgttcaatggtgagaagatcaactacaccgagggtcgagccgtgctgcacgtggctctgcggaaccggtcaaacacacccatcctggtagacggcaaggatgtgatgccagaggtcaacaaggttctggacaagatgaagtctttctgccagcgtgtccggagcggtgactggaaggggtacacaggcaagaccatcacggacgtcatcaacattggcattggcggctccgacctgggacccctcatggtgactgaagcccttaagccatactcttcaggaggtccccgcgtctggtatgtctccaacattgatggaactcacattgccaaaaccctggcccagctgaaccccgagtcctccctgttcatcattgcctccaagacctttactacccaggagaccatcacgaatgcagagacggcgaaggagtggtttctccaggcggccaaggatccttctgcagtggcgaagcactttgttgccctgtctactaacacaaccaaagtgaaggagtttggaattgaccctcaaaacatgttcgagttctgggattgggtgggaggacgctactcgctgtggtcggccatcggactctccattgccctgcacgtgggttttgacaacttcgagcagctgctctcgggggctcactggatggaccagcacttccgcacgacgcccctggagaagaacgcccccgtcttgctggccctgctgggtatctggtacatcaactgctttgggtgtgagacacacgccatgctgccctatgaccagtacctgcaccgctttgctgcgtacttccagcagggcgacatggagtccaatgggaaatacatcaccaaatctggaacccgtgtggaccaccagacaggccccattgtgtggggggagccagggaccaatggccagcatgctttttaccagctcatccaccaaggcaccaagatgataccctgtgacttcctcatcccggtccagacccagcaccccatacggaagggtctgcatcacaagatcctcctggccaacttcttggcccagacagaggccctgatgaggggaaaatcgacggaggaggcccgaaaggagctccaggctgcgggcaagagtccagaggaccttgagaggctgctgccacataaggtctttgaaggaaatcgcccaaccaactctattgtgttcaccaagctcacaccattcatgcttggagccttggtcgccatgtatgagcacaagatcttcgttcagggcatcatctgggacatcaacagctttgaccagtggggagtggagctgggaaagcagctggctaagaaaatagagcctgagcttgatggcagtgctcaagtgacctctcacgacgcttctaccaatgggctcatcaacttcatcaagcagcagcgcgaggccagagtccaataaactcgtgctcatctgcagcctcctctgtgactcccctttctcttctcgtccctcctccccggagccggcactgcatgttcctggacaccacccagagcaccctctggttgtgggcttggaccacgagcccttagcagggaaggctggtctcccccagcctaacccccagcccctccatgtctatgctccctctgtgttagaattggctgaagtgtttttgtgcagctgacttttctgacccatgttcacgttgttcacatcccatgtagaaaaataaagatgccacggaggaggt

SEQ ID NO: 97 - DNA, 17920 bp, Homo sapiens
gccatccccagccaggcaagggcccctggtgtcccagccaaggcccgtcctctaaagaattctctgaagaaactttcccagaatgctgggaatgtgcagggatcttggcagaaatgagaggaagaacttagaaaggaggcctccgctaatcattacaatatgcctcagtgtcttctgcagtgcttagggagcaagttcccgtgagacgaaggaccagagcgtaggaaatgtgagaatacatggaagaatgtccccttcaaggacacctggcctgacaatgtgggtgatcagcctcccacaaaattaaaaaaaaaaaatcacaagaacagagacaagggttctcatcatactacgaaatgaccgaaaagcaatacaaattataagacccaatgctgctggtgggactgtaaggaaatggacacctcgtgaactgttgtggactctgaaatgggttgctctttccggaggacattacgagcctatgttataagagccatataaacaatcctacttcttggaccttagcccagggaagaaagacagccttctgcaccataatgtgtacagaaaagttgtctggggtagtgaggaagcagtgagaaacagccttggtgcccagtagctaccatgaagtaaacagcaccttaacaaagattccgtagccattaacatgatcaatgtgaagatgagttttggctgtggaaaatactaagaacaagtaktascaggcagaagttcactacactaaaccagggggataccccccaccacagtgggggactgctgcctttatcagtctccagcaggaggggagggggccctgcaggaagagcaggagtggatgtttcaggagagggtccttgggcacaatattttttcaaaataaaaacagacacgtgtgaatccatcacccacccaaagcaccagaacatttctaatgatttcagtccacctcttccttgacatcattcctctgtctcccctcagagatggtttcctgaatttcatccttgctgttaaaaaaaatctatagttttattgcatgacatactgaaattatttctttagtcttgcttgtttccaaactttataaaaagagcatcagttttctgaggcttacttttttcactgaacatcctgtttttgagactcatacaggttgatggatggagctgaagcttcttcattttcattgctatattgtattccactatataaatctactacaatttaggcattctttcattgatgtgcatttgggctcttttttcacagttgaaaagtgtcatgaacattttggtacttatttcctggatcatatgtacaaatggctccctagagtatatacctgggggtagcattgctgggtcataaggtatacaggtattcaactttataagacaatgccaaattgttttccaaagtgggtctatgaataattctgccaggaatgtatgcaagatagttttctccaccacttggtgttatcaaacttctcaatttggccagacatgatggctcacacctgtaatcccagcactgtgggaggccgaggtgggcagatcacctgaggttgggagtttaagaccagcctgaccaacatggagaaaacccgtcctacccagtctctactaaaaatacaaaattagccgggtgtggtggtgcgcgcctgtaatcccagctacttgggaggctgaggcaggagaattgcttgaacccagggggtgaaggttgcggtgagctgagattgtgccattgcactccagcccaggcaacaagagcaaaactgtctcaaaaaacaaaaaacttctaaagttttgtcaatcaaatgagtataaatatcctaccatggtcttgatttgcatttccctcattaktaaagaggttgagcatcttcacatgtttgtaggccacacgagtttcctcttcgtaaaatacctgttcaggtctttggcccatttttcttttcttttcttttttttttttttagacagagtcgctctgtcacccaggctggagtgcagtggcaccacctcagctcactgcaacctctgcctccttcaagcagttctcctgcctcggcctcccgagtaactgggattacagacgtgtgccaccacgcctggctaatttttgtatttttagtagagamtgggtttcaccatgttggccagtctggtgtcgaactcctgacctcaggtgattccacccacctcgacctcccaaagtgctgggattacaggcgtgagccaccgtgcctggccctgatttgtgtgggttttttttttgtttgtttgtttttgagatggagtcttgctctgttgcccaggtgggagtgcagtggccagatctcagctcactgcagcctctgcctcctgggttcaggtgattctcctaccacagcctcccgagtagctgggattacaggtgtgcaccatcatgcctggctaatttttgtattttttttttactggagaccgggtttcaccacattggccaggctggtcttgaactcctgacctcaggtgatccacccaccttggcctcccaaagtactgggattacaggtgtgacccactgtgcttggcttgatttgtggttctgtacatactctttacatagtcttgatcctagtcctttttcagatataggtgtgtgtgtgcgtgtgtgtgtgtgtgcaaatatctccttccagttgtgtccagtttttttccactttaagattttcatttttaagttttgtctgcttaaaactgctatattgctaaatttggcaagtttaatattgctatattgtatttcactgtataaatatactacaatttacacattctkatatacctgtagtcaaatttataaatttaaaattttgtggttagcacaaaacagcatagtttttgtgtcttgattaggaaatccttcctcacctgaaagtcagaaatagattcccttatattttctattaaaagtgttgttcttgaaatttaaggccttaatagggctggaatttttgtttatgatatgatgaatctaattttaatttatttttccatttactgacctatcatgccactcccctctcagatatcaaaactttaaatttgcatggatatatttctgggctttctattagctawttctatgttggcatattctcattaattcatataactttataataaagtttgataatttgcagggcacatcattcttattattcttcagaattttcttaggtatttatgccctttgtccttcaatatacattttagaatcttcttgccaaaaataattttataaaaaataccttttggattttgactagagttgtgttgaatctacagatcaatatggagaactgacaacttttattcatgaccatgagatagctctacatttacttttctttcttcatatatttctgtatgttttatcattattttacacataggtcttgtgcatatttttaaaccattttttaaaatgtaatatatacacaacacaaaatttaacatcttaaccattgttaagtgcacagttcagtggcattaagtaattcacatcattgtgcaaccctcactaccatccatctccggaacgatttcattttcccaagctgaaattctgtacctactacataataactccccttttcctcctccctcagtccctggtaaccaccattctactttctgtgtctatgaatttgactaggtacctcatataagtgtaatcatacatgtccttttgtgatttggtatttcacttagcagaatgttttcaaggttcattcatactgtaacatgtattataattttattcatttttaaggctgatctatattccattggtatgtawacaccacactttctttatccattcatccatccatggacatttgtgttgcttccaccttttgtctattgtgaacaatgctgctgtgaacatgggtgwacaaatctgtttgagctcctgctttcaattcttttgtgtatgtacccagaattagattgttggatcaaatggtactcctatttttaatttttttagggaccatcatactgttttccatggtggctacacccttttacattccaatacaaaagggttcgaatttctccacatcctcaccaatatttgtttccttttcttttaaaaaattaataattgtcatcctaatgggtgtcttgtacatattttgttaggttgtttctaatctatatttcaatattataaatggtatcttttaaagtttcccatttaaaaaaatcatgttagtttgaaatgattaaaaaaattaataatagtcatcctaatgggtgtcttgtatgtattttgttagattgttcctaatctatatttcaatattaaaaatggtatcttttaaagtttcccgtttttaaaaatcgtcttagtttgaaatgattttagggttttaacaaaagttgtgagactgggcacagtggctcataccagtaatcccagaactttgggagaccaagatgggaggatcactcgaggccagaagttcaagaccatcctgggcaacaaagtgagacctgatctctacaaaaaataaaaaaattagccctgcatggtggcacacacctatagacatagcttytytgaaggctgagacagaaggcacacctaagcccgggagttcagctgcagtgagctatgattgtgccactgcaatccaacctgggtgacagagtgtgactctatctctacaaaaaaaaaaaaaaaaaaaaaaaaattgcaaaaaaatgaacacagacttcccattccttccacacccagattcccctaatgttggcatcttacttatctaacccagaaaattaacactgacatgatactattaactaatctatagacctaacttgaacttggccagttctcccactaacattcttttcccagtctgaratccaatccaggatcccacactgtgattcgttgtcatgttgttacccagggggtccttgcttccagagctcccaagatggtggcgggctgcttccaagatggcagcaagcctcttgttctctgacctggggttcttggcctcaaggattctaaggaatggaatcttgggccatgcggtgaatgttatagctctattagaagctgtgggtcacggaagagaaccatgaaacccagctactagtgttcagctygattaggatgaacccaggcacttagccatgcgggaacaatggcaagcctttagcccgatccggagtggcaatgggcgcctcactggatcaggagcagagcagacaccctgccagatccggaggggtggaagtcagcggcgggtctgcaacagcgacaaacagcagtggtggacggcaagcgaaaacttagcttgagctgtaacaaatatggaccagaagagtgtgcaattgcaagattttatacagtgaaaacagagctcccatacaaagggagggacccaaagggggtagctgttgctggcttgaatgcctgggtttatatcctgatcattgtccctcctgctgtgctctcaggcaatagatgattggctatttctttacctcctgtttttgcctaattagcattttagtgagctctccttactatctgattagtcgggtgtgagctaagttgcaagccctatgtttaaaggtggatatggtcaccttcccagataggcttagggattcttagttggcctgggaaatccagctagtcctgtctctcagttctccytctcaacaggaaaactcaagtgctgttggggaggttggccaatgactgctctaactgcttcctgcggaattggggcgtagtaggggtcatgcagttgagatttccttgggaggggcgccttcgatgtcatcaacattggagcgtgggctagcaggccagtccaggggtccgtggtagatcttagtcatggactgcatctggggctccatttgaagatcgatttgtagttttacagctttgattctggaagagacaaacttaacaaagaggttaaagagacagggattgaaatgtatggcctgcagtgtaggggattatttctttggcacactttacaggccctgactatctgcttgacagtttttaaaaggcctagtccagtaaacaataatttggccatctgatgggtgctatcaatgcctaagtgaaaggtttggtgaaggattttaagtaattttcattggttagctgcaggcaaaagtatttttccttcttcgttggctagccatcctgagaggaggaaactatgtcctcatgaggttccctattctatttctcctgttgagtactggggcttggtttcccagaggggattaacccatactaggggtccttctataagcatttttaatgaagggtcctgctttgtggctcttttggcttcaatatctgcttggtggttcccttctatttccttttcctttcctttctgatgaccctggcagtgtaagactgccacctctttaggtttctgtacagccaataataatctcctagtggcttcctgatgtttgataggtgttccctcagaagttaggaatttcctttctctccatattgctgcgtgggcatggaggactaggtaagcatacttagagtgtgtatatatatttaccctttttccttctcctaattttagtgccaaagtgagggctattagttttgccagctgaatgctagttcctggagtgaggggattactttcaagtatttaattattactgaccactgcataccccgcttttcgaagtcctttttctacaaaggaacttccatcagtatacaagttgaggtcgggatcagtcaagggaacctctagaaggtccccttgagcggcgtaggtttgagcaatcacctgttgacagttaagttctatcttttcttcattgtctggaagaactgtggctgggttaagagttgcacaagtgcacagttgcggcactggcccttcaagtaatagaggctgatatttaagcaaaaagttgtctgacagccacaagtctcctttagcagtgagtatgccatttatatcatgagatgtccacacagtaagatttcttccctgtattattttaactgcttcagatactaggactgctactgccgccactacccgtaaacagtgargccaaccttttgccactacatcaatttccttactgargtatgccacggggatgcaagctgatccctcagacctgtgtaaggactcctagaactattcctgtttttttctgtgacatataaagaaaagtcttgccccgttggcaagtttaacactggggcttgggttagggccttctttagggcctggaaagctgcttctgcttcaggtgtccatcttactaaatgggtattggctttttgagtttccttaattagtgtatataatggcctggctatttcgccatacctgggaatccatatttggcagaagcctgttatgccaaggaactcccttagttgctttagggttttgggatgaggaaaagccagtgtaggctggatacattcttcactgagggtcctggtgcctttggataattttagccttaagtatttaacctgctgtgagcagagctgagcctttggtttggaaaccttgtagccacaggtggcaaggaaatttaagagcacttgggtggcttgatggcacaaggtttctgaacgggtggctaaaagtaaatcatccatgtaccaaaggacaagagtgtccaggtatgagaactggctcaagtcttgggctaatgcctggccaaatagatgggggctatatccctgaactcttggggtaaaacagtccaggtgagttgagatgttgggttagaaggatcttcaaaggcaaacaagaattgagagtcaggatgtacagggatgcagaaaaaggcatccttaaggtccaggactgtaaaccactctgcttcctctggtatttgggaaagcagagtataaaggttaggtatagctgggtatagagggacaacagcctcattgataatcctgagatcctgcactaacctccactgtctgttgggtttctgtactcctaaaattggagtattgcaggggctactgcatggttttactaggccttgggcttttaggttcttaacaattttttggagtccttgttgggcctcgtgtctaagggggtactgcctttggtagggaaaggaggcagaattctttagtttaatttgaacaggacgggaattctttgcttgtccatattgtccttctgttgcccagacttcaggattaattccttcctcaagcaggggacaacaaatgggtgttccttctcctatgttcgggtgtgtaatggctcctgcttttgctagaatgtctctccctaacaaggaaatggggctttcaggcataattagaaaatcatgtgaaaaggagtaaagttccccagtcacaacttagtggctgggagaagtatytagtgactggctgtcctaggagccctcggatagtgacagatctggaggacagttktccaggacaggagagtaagactgagaaggctgtgccagtgtccargagacagttaacytcctggcccttcaatggtcaagcawacccagggctctgtgarggtgatggcatgggctggtgcttgctccgggaaccttcagtcctgctgctggatcatctagttagtggcttctgactcagargaccttcatcccctgggggcartgggccttccagtgatgcccttgacataaggggcgtggatgagggggcagcttatttctawttggacaatcttttttaaagtgttcttgtagaccacactggaagcaagccttattaggcattcaatttgcccagcctttcccttttccagagcytccaaagttcgcttgcctgagggccatgactaaagtggtggccttttttaaatcccatttgtcccattccacctgcttctcctgatctctattataaaaaaccaaggttaccaagttcaatagggtttttaagttttgctccgggcctaaggcaggcttttgaagtttttttctaatgtctgcagctgactgagtgataaacttatcctttaagattagttggccttcaatagagtcaggtgacagggaggtatgcttcctcaatgcctcccttagtctcaccagaaaggcggtaggattttcttcctttccatgtgttacagtggacatcattgaataattcacaggcttctttctagttttccttagtccttctagcacgcaagttagcaaatgtctgcggcaccaatttccatgttctgattctgtgtcccaatgagggtctacactgggaactgcctgctggcctgtggggaattgttctttcctctgttgtcatcctatcattgacctgactgagataccagagatcgccaaactcgcgggctccagttatggcatcacttctctcatttggggttaatgtcggatttagcagtaacattatatctctccatgtcagatcaaaggattgtcctaacccttgtaaaacatcaatatagccatctgggttatctgagaatttacataggtctattttaatttgctataagtatgagagagaaaaaggtacatgcactctggctgggctgaattctcctcctcctactgcttggagggggcataatagggaaatattggcactctttggttcattgtttacccctttgtttatctccttttggaccgtttgggttgaaggggggttcttattagttggggaaggagtcggggggacactggggtagggaagtagactccgagggcttcctgtagggcataaatcacactttttacataattgtgagttgtctgttaatgaaaagaaagtttgtacatgtggcacttcactccatttgccttctttctacaaaagargtctagctgtaagatggtgttataatttatacttccctcaggaaggcaggtttctcttgaagargatatcatggccaggtggtactgcagaagaaaataagtcatttctttcttagcgtctgaaggtcaaattggtcccaattctccagaatacatcttagggttgtttttgcctthgggggaatgcttcccatcagaaaaaagaacatagggatgccagcacccctagtcattttctgatgagcattagtcctagagcgtcctctatggtcctagtgcttattcctttccagggtgcgtaaccacccatggacttctgcttattggattagttatgctcaccgatgtagcagtcctgcacctgttttcccacctttcttgaccacagagaaaggggtccgggctgctggtttctagtggtactttaccagcatgcccaacattgcctttgtgctcaggggtgagtcctagagctgggctgggctcctgagtatttcataacaacccagtttgccccatcaagatgcattctcataaacagttcttatgcagattcatttcagagagggtgtaggtaactttttgagtcaggattgagataaagttttttgattctgtaagtactttaaggcttggctgagtgcaaacagatccaacgtttgagcagaccaattattaggcagttctcctaactctgcttccacaagagtctccttatcaattactgaatacccattgtggtttttttctcaatcacctgggagaaaccatctattgtcctgtcctgaagggaattcctcctaggtcttgtcagatctttgtacggtaattaagatttaaatcccctgttaggaaatctgctgggttaagggaattatcagtggttggtgttaaattacctttttctaacagaatagccccatactttaagatttttgagttagtaagctacctttttgcttttttgacttagaataattctgaactggtgaggtgtgctcacaatgaggtttcctctaaaagttacttttctactttcttctgttagcaaagcagttgctgctacagattgaatgcatttgggccatccgtgggttactgggttaaggatttttgataggaaggctatgggttgtcagtggtctcagtgtttttttcaggttacgtccttgtttacactgacaacaaggtagtattggagtgttatagggtcacagagaagaccttcaattatcaattttaggttttaaatttaccctggcttttaaaggtgtagggcacactgggttttkttaattttattttattttatttctatctttctctttctttctctctttgactccctcgttgtctctctgcctctttctcctctctgtctctctctctcctctctgtctctctcctctctgtctgtctctgtctgtctctctctckkkyctgtctctctctctctctctctctttctctctctcttcttttagccatttacaaacttggggccctggcaaggatggtggggaatgggtttcacataactgcccatgttgagagctatatacctaaatcaggagggacaccagggacaagactccctgggtttatagcctagatgcctaaggatgcagcctagagcttccttagatccctttggagatacaacttgctagaggaaatgaaagtctgaaccattagtacctaggaggcagggatcggaggaagtagattcagaggtaaggagaattttggggctacactttcaagaaagtcgtggttgggacccaggaggtatgagtcagaaggaaaggtaggggcacacgcatgggcggctgttgaatagagacttctggctgtgccatgatctcaacaggctaatgctgggagttcgggatgacagctttctgcctctagtcagccctcggcttccccaggaaaattgaaagtggaagctggttccaggcagaccaacgttcccaacccagaagggttgggggttgttagaaagcccttccccaaacagcctcacaccttgagtcttaagtccggcagccatgctaatcatttttaaccggctgacaggtacctggtattttcctccaattctaaggaaggataggacagaatagcaagcaaaagtagtccaatattactcactgctttggagatccctttgtggttgccaaaatgttactgggggtccttgcttccagagctcccaagatggtggcaggccacttccaagatggtggcgggctgcttccaagatggtagcaagcctcttgttgtctgacttggggttcttggcctcacagattccaaagaatggaaccttgggccatgcagtgagtgttagagctctattagaagctgtgggtcacagaagagagccgtggaacccagcgactagtgttcagctcaattgggatgaacccgggcacttagctgtgcaggaacaatggcaagcctttagcctaatccagagcagcaatgggcacctcgctggatcaggagcacatgagacaccctgccagattcggaggggtggaagtcagcggtgggtctgtgacggcgacaaacagcagtggtggacggcgagtgaaagctcagctcaagctgtaacaaacacggaccagaagagtgtgcagttgcaagatttaatagagtgaaaacagagctcccataaaatgggaggggacccaaagagggtagccgttgccagytcgaatgcctgggtttawatcctgatcattttccytccytctgtgytctcaggcaatagatgattggctatttytttacytcctggttttgcctaattagcattttagtgagctctctttactacctgtttggtcaggtatgagctaagttgcaagccccgtgtttaaaggtggatgcggtcaccttcccagctaggcttagggattcttagtcagcctagaaaatccagctagtcctgtctctcaatgtcttcttagtctcctacagtctgggaaagttcctcagcctttttcatgctttaatacttgaaaagtactaggcagttattttgtagaatgcccctaaatctgtttggtggtgggattttttttttaattttcttccacttttattttaagttcaggggtacatgtgcaggatgtgcagatttgttacacaggtaaatgtgtcccatggtggtttgctgcatggatcaatccatcacctaagtattaagcctagcatccattagctattcttcctgatgctctcccttccccacccagccttgtttggtgttttcttatgattatattaaggcatatatttctggcaagaatacctcagaagtgctgttgtgcccttagtacatcatatgcaggggtgtatgatgtcatcatatcccattactggtgattttaattttgattacttggttaaaatgatatctgccaaatttcttcactatgaagttattattttcccctttgtaaatgataagtatcttatagtgagacacactctgatattatgtaattatctgtttctcatattttcatcctctaattttaatattcatcaatgattcttgcctgtaacaattataactggtgcttgccaaatggtgatttttgaattttcatcattttttctacacttattactgcgggattctacagtaaagaagagctgtccctttgatactacttatttattcacttatttatattattatggactcatatttattctatgggttataacatattactatcattatttattttattgctaaaattgtcccagatttgtccactggggacacaccttcagtttggctcctgtgttcttttgatgtgcccccatcattttagggtgctttcttgctttctggcaccacaagatattttataatcatcttggtactggtccctgctccaacccttggaatcaaccatttctccaacgaaccctggttcttttatttaggaaccaatatstgagtactaggtgtgytcattgctactaagctgttattttttctaggccatctagtggacagaggtagaaaatagacttggcacacacatctatctatctatctatctatctatctatctatctatctatctatctaatctatctatcatgagttcattctggwacctttggttccaatccaagaccacagtsttcattctagtcttcccctgtcttgtgtgtgtgtgtgtgtgtgtgtgttttagacggagtcttgctctgtcacccaggcagtggcgccatctcagctcactgcaacctctgcctcctgggttcaagcaattctccgcctcagcctctggagtagctgggattacaggcaggtgccaccatatccagctagtttttgtattttttagtagagacagggtttcaacatgttggccaggctggtcttgaactcctgacctcaggtgatccacctgccttggcctccaaagtgctgggattacaggtgtgagccactgttcccagcttcccctgtcctttattgtaactcctttctctgacaaaaacctagctcttattatctacaatatagttacttatttgcttaaatattatacacatagtttcagaactgcaaatccatctctgcgagaaacaaattcactaactagggtaacagtacttgtgtacagttcttttcatctttagctttacaatatgtagttgatatgctatttttcagttacttagattagtccttttcttccccatcctcttcaatgcagttatgatgtttatttgtatcacattaggtttatttgctgctgtttggattacttctttgtactggttggttttagttaattacttatttggggatagggtgtatgtgaaaccttactaaggttctaaaatcagaattacacaaaaagctatactcagagaacagtctctcccctcccattccgtctaccccattccattccctcattattttcacccattcccacccactcaccctcagagataattagtctcattagtttgtgacttatcctcctgtatttttttcacaaatgagcagatacatgtatattcttatatccccttttattacatgaagggcagcttactagagatactcgagcattttgctttcttcacttaccaatatggtctggaaatcattccatatcaatgaatagacattttcctcattcttttttacagctgcataatgtcactttttatttttgagatagtctcaccctatcgcctaggctggagggcagtggagcattcatagctcatggcagcttcaatctcctgggctcaagtgactctcttgctttagcctcccaagtagctgggactaacagcatgcatcactacacctggttaattattttatattttgtagagatgggtcttatttkgttggccaggctggtgttgaattcctggggctcaagcaatcctcctggcctcagcttcccaaagtgctgggattacaggtgtgaggcactgcaccagttctagtattgcactgagtggctataacactgtttattcaaccagcctcctatgtatatggatatttaggttttttcccaatattttgtgatacaatcaatgctgcagtgtgaataaccttgtacacatgtattttcttactgttggaagtgtgtctysgggataaattcccaaagtgggatkgctaaattaaaaagtaagtgtatacatagttttttaagtgtatcagtggtctgtaagactgctctcaggctctgcaattcaccagaagccattcatgggccycaaaaattgttccaaggccaggtgcagtggctcacgcctgtaatcccagcattttgggaggccaaggtgggcggatcacctwargttcaggagttcaagaccaccctggccaatatggtaaaactctatatctaccaaaaatacaaaaattagccggatgtggtggtgtgcacctgttgtcccagctactcgggagcctgaggtaggagcatcacttgaacctgggaggcggaagttgaagtgagccaagatcacaccactgcactccagtctgggggacacagtgagacttcgtctcaaaaaaaaatgttattatacacactgctacaatttattgcaacaaaagggtacaatgcaaggtcaataaagggaaaaggcacattgggtggagtctagaggatactgggtaccatctttccatcttctcccaatgaaagtacatgggaagcccttactcccccaacaatgaactgcagcaacatgtgtgaagtctttctgccagggaatctccctgagcctaagagcccagcattgttattgggggttgaacatgaagccacacagtgctttcatgatttaactgtaattactgaaactgcattgcccaatgtcagaccccaagaaggaaagatgttcagcataaggcataagctatctagacaagctggtacaatgcggttcaaggttccaagcatgccaaacactcttcttaaatatttttttagagataaggtcttgcccactgcagccttaaactcctgggctcaagctatcaggaatggctcaaccacccagggcgctaggactacaagtgtattccaccatgcctggctaatttttttgtttgtttttttagagatgggggttgggtctcgctatattacctaggctggtcttgaactcctggcctcaggcatttctcccccctcagcctccccaaatgctgggattacaggcatgagccactgcacctggcctcaaacactcttaatggtagcacagggaacactccaaaagttcaattccagaagccagccaaagactaatcactcaagcagtcctttctgaacatgtgcaagacataaacaaatcagggtgtctgggttaactcgttctttcatatcaggtattgccaaattgtccttcagaaaggttgtgccagtttgcatgcccatcagcaatgtatgaaagagcttgtttccccacagcctcatcaacaaaatgtgccaatgtgataggtgagaaatgtcacagtattgctgtaattagcatttcagcaaattttgagtgagtttgaagatttttttcattgaatggcatacttttacaagttatattttctaattgttttgggtttacagaaatgcaattgacttttatgtattcacattatacgcagctaccttgctaagctctcctattgtttctgattctctgtggattctttggggttttcttttcttttcaatctttatgtctttaatttctctttcttatctcattgcactggctagggccaccagtataatgtcaaataagtaattgtgggcatctttgtcttccctctgattttaaaagggatacttttaatgtttcctttttaggatttttttttttgtggaggggatagttttttcgttattaaattttttcatttttcttaggatttttctttaaaaatcacaaattgttgaattttatcaaatgcgttttctgcatctataaacatgatcatatggttttctccattgatctattaagtattgatctattacttatataaatataagtatttatatattatctaggccaggcacagtggctcaggagcctgtaatcccagcaccttgggaggccagggcaggcggatcacccaaggtcaggagttcaagaccagcctggccaacatggtgaaaccccgtctctactaaaaaatacaaaaattagccaggcgtggtggtgcatgcctgtaatcccagctactcaggaggctgaggcaggagaattgcttaaatccaggaggcggaggttgcagtgagctgagatggcatcactgcactccaggctgggtgacaagagtgagactctgtctcaaaaaaaaaaagtatatatatatacatatatatatttatatatacacatatatatttatatatacacatatatatttatatatatacatatatatttatatatatatttatattttctaatag

SEQ ID NO: 98 - DNA, 2349 bp, Homo sapiens; identical to SEQ ID NO: 28

SEQ ID NO: 99 - DNA, 3381 bp, Homo sapiens
cgcgattctcagggattgatccgcctcttcaggtaagttatcttccggccccgtaccactgtgccacaggcgcagcccgcttcctcaggtgccctatcccgcgcagaagaccacggcttcacagagtgttatttaagggcgtggccagcggaacatcccgccccattctgtgacgcacggggtggcgcgcgtgggacccgaggggtggggctgggtttagtaggagacctggggcaaggccccctgtggacgaccatctgccagcttctctcgttccgtcgattgggaggagcggtggcgacctcggccttcagtgtttccgacggagtgaatggcggcggcggctgggatgctgctgctgggcttgctgcaggcgggtgggtcggtgctgggccaggcgatggagaaggtgacaggcggcaacctcttgtccatgctgctgatcgcctgcgccttcaccctcagcctggtctacctgatccgtctggccgccggccacctggtccagctgcccgcaggggtgaaaagtcctccatacattttctccccaattccattccttgggcatgccatagcatttgggaaaagtccaattgaatttctagaaaatgcatatgagaagtatggacctgtatttagttttaccatggtaggcaagacatttacttaccttctggggagtgatgctgctgcactgctttttaatagtaaaaatgaagacctgaatgcagaagatgtctacagtcgcctgacaacacctgtgtttgggaagggagttgcatacgatgtgcctaatccagttttcttggagcagaagaaaatgttaaaaagtggccttaacatagcccactttaaacagcatgtttctataattgaaaaagaaacaaaggaatactttgagagttggggagaaagtggagaaaaaaatgtgtttgaagctctttctgagctcataattttaacagctagccattgtttgcatggaaaggaaatcagaagtcaactcaatgaaaaggtagcacagctgtatgcagatttggatggaggtttcagccatgcagcctggctcttaccaggttggctgcctttgcctagtttcagacgcagggacagagctcatcgggaaatcaaggatattttctataaggcaatccagaaacgcagacagtctcaagaaaaaattgatgacattctccaaactttactagatgctacatacaaggatgggcgtcctttgactgatgatgaagtagcagggatgcttattggattactcttggcagggcagcatacatcctcaactactagtgcttggatgggcttctttttggccagagacaaaacacttcaaaaaaaatgttatttagaacagaaaacagtctgtggagagaatctgcctcctttaacttatgaccagctcaaggatctaaatttacttgatcgctgtataaaagaaacattaagacttagacctcctataatgatcatgatgagaatggccagaactcctcagactgtggcagggtataccattcctccaggacatcaggtgtgtgtttctcccactgtcaatcaaagacttaaagactcatgggtagaacgcctggactttaatcctgatcgctacttacaggataacccagcatcaggggaaaagtttgcctatgtgccatttggagctgggcgtcatcgttgtattggggaaaattttgcctatgttcaaattaagacaatttggtccactatgcttcgtttatatgaatttgatctcattgatggatactttcccactgtgaattatacaactatgattcacacccctgagaacccagttatccgttacaaacgaagatcaaaatgaaaaaggttgcaaggaacgaatatatgtgattatcactgtaagccacaaaggcattcgaagagaatgaagtgtacaaaacaactcttgtagtttactgtttttttaagtgtgtaattctaaaagccagtttatgatttaggattttgttaactgaatggttctatcaaatataatagcatttgacacattttctaatagttatgatacttatacatgtgctttcaggaagttccttggtgaaacaattgttgaggggggatctaggtaattggcagattctaaataatataatttccagatagtaattttaagagtactcatcgctcttgccaaataagttcagggtattcaaatcttggactagtcctgcaaggtataaagaataaaaatcccagtgagatacttggaaaccacagtttattattatttatctgggcaattattgtgtgtgtgaggatggaagggtagggaataatcgaacatctaaagccttgaataagagaatactaattgttttggtatgatgatactcagaaatggagatattataggaaaaagaaatcctttggaattttaactaaaatcactgcatatgggaaattaagagatccaggaccatatttgataagagttcctaaaaataatgtaattattaatgctaaagactgctcatgtatcttgatctaattactaaataaattacatatttatttacctgataaatatgtatctagttctacaaggtcacatttatgtggaagtccaaagtcaagtccttaggggataattttgttttgggctcagttgttccctgcttccttttttttttttttttttttttgagatggagtctcgctctgttgcccaggctggagtgcagtggtgcgatctcagctcactgcatcctctgcctcccgggttcaagcaattctctgcctcagcctcccaagtagttgggattacaggcacctgccaccatgcctggctaattttttgtatttttagtagagacgggggtttcactatgttggctaggctggtcttgaactcctgagcctcgtgagtccacccgccttggcctcccaaagtgctgggattacaggcatgagccaccgcacctggccttccctgcttcctctctagaatccaattagggatgtttgttactactcatattgattaaaacagttaacaaacttttttctttttaaaatgtgagatcagtgaactctggttttaagataatctgaaacaaggtccttgggagtaataaaattggtcacattctgtaaagcacattctgtttaggaatcaacttatctcaaattgtaactcggggcctaactatatgagatggctgaaaaaataccacatcgtctgttttcactaggtgatgccaaaatattttgctttatgtatattacagttctttttaaaacactggaagactcatgttaaactctaattgtgaaggcagaatctctgctaatttttcagattaaaattctctttgaaaaaat

SEQ ID NO: 100 - DNA, 916 bp, Homo sapiens
ggccggggggcgcagctagagagccccggagccgcggcgggagaggaacgcgcagccagccttgggaagcccaggcccggcagccatggcggtggaaggaggaatgaaatgtgtgaagttcttgctctacgtcctcctgctggccttttgcgcctgtgcagtgggactgattgccgtgggtgtcggggcacagcttgtcctgagtcagaccataatccagggggctacccctggctctctgttgccagtggtcatcatcgcagtgggtgtcttcctcttcctggtggcttttgtgggctgctgcggggcctgcaaggagaactattgtcttatgatcacgtttgccatctttctgtctcttatcatgttggtggaggtggccgcagccattgctggctatgtgtttagagataaggtgatgtcagagtttaataacaacttccggcagcagatggagaattacccgaaaaacaaccacactgcttcgatcctggacaggatgcaggcagattttaagtgctgtggggctgctaactacacagattgggagaaaatcccttccatgtcgaagaaccgagtccccgactcctgctgcattaatgttactgtgggctgtgggattaatttcaacgagaaggcgatccataaggagggctgtgtggagaagattgggggctggctgaggaaaaatgtgctggtggtagctgcagcagcccttggaattgcttttgtcgaggttttgggaattgtctttgcctgctgcctcgtgaagagtatcagaagtggctacgaggtgatgtaggggtctggtctcctcagcctcctcatctgggggagtggaatagtatcctccaggtttttcaattaaacggattattttttcagaccgaaaagaaaaaaaaaaaaaaaaaaaaaa

SEQ ID NO: 101 - DNA, 2386 bp, Homo sapiens
accaagtgaggaaactgggggacgctgtggggaggggcgtggggctggatcgcgcagcggctgcttcctttaccttcctcccatggtctccttccggttctcgatgcttctctgagcctaagggtttccgccactcgttcaccctccccccagctcatgatcttcctccctcccccgccctcctggtccaatctccgatctgtttagtaagaaggtgctgttccgagaaggagaaggaaaagggcttgacacgtattcactcggccccggacgtgggaagcaagccgtctggcttcggcctcacatcggtcctgtgctcgggacggcggcgttggcggactgatccgcggcggtgaagaggcgcctgtgtctggcagagctggtgtgagacgagacaatcctgccccgccgccgggataatcaagagttttggccggacctttgagcatacaccgagagagtgaggagccagacgacaagcacacactatggcgctgaaacggattaataaggaacttagtgatttggcccgtgaccctccagcacaatgttctgcaggtccagttggggatgatatgtttcattggcaagccacaattatgggacctaatgacagcccatatcaaggcggtgtattctttttgacaattcattttcctacagactaccccttcaaaccacctaaggttgcatttacaacaagaatttatcatccaaatattaacagtaatggcagcatttgtctcgatattctaagatcacagtggtcgcctgctttaacaatttctaaagttcttttatccatttgttcactgctatgtgatccaaacccagatgaccccctagtgccagagattgcacggatctataaaacagacagagataagtacaacagaatatctcgggaatggactcagaagtatgccatgtgatgctaccttaaagtcagaataacctgcattatagctggaataaactttaaattactgttccttttttgattttcttatccggctgctcccctatcagacctcatcttttttaattttattttttgtttacctccctccattcattcacatgctcatctgagaagacttaagttcttccagctttggacaataactgcttttagaaactgtaaagtagttacaagagaacagttgcccaagactcagaatttttaaaaaaaaaaatggagcatgtgtattatgtggccaatgtcttcactctaacttggttatgagactaaaaccattcctcactgctctaacatgctgaagaaatcatctgagggggagggagatggatgctcagttgtcacatcaaaggatacagcattattctagcagcatccattcttgtttaagccttccactgttagagatttgaggttacatgatatgctttatgctcataactgatgtggctggagaattggtattgaatttatagcatcagcagaacagaaaatgtgatgtattttatgcatgtcaataaaggaatgacctgttcttgttctacagagaatggaaattggaagtcaaacaccctttgtattccaaaatagggtctcaaacattttgtaattttcatttaaattgttaggaggcttggagctattagttaatctatcttccaatacactgtttaatatagcactgaataaatgatgcaagttgtcaatggatgagtgatcaactaatagctctgctagtaattgatttatttttcttcaataaagttgcataaaccaatgagttagctgcctggattaatcagtatgggaaacaatcttttgtaaatgcaaagctgttttttgtatatactgttgggatttgcttcattgtttgacatcaaatgatgatgtaaagttcgaaagagtgaatattttgccatgttcagttaaagtgcacagtctgttacaggttgacacattgcttgacctgatttatgcagaattaataagctatttggatagtgtagctttaatgtgctgcacatgatactggcagccctagagttcatagatggacttttgggacccagcagttttgaaatgtgtttatggagtttaagaaatttattttccaggtgcagcccctgtctaactgaaatttctcttcaccttgtacacttgacagctgaaaaaaaacaacatgggagtaataatgggtcaaaatttgcaaaataaagtactgttttggtgtgggagttgtcatgaggctgtgttgaagtgacttatctatgtgggatattgagtatccattgaaatggatttgttcagccatttacattaatgagcatttaaatgcaacagatatcatttcaggtgacttaacatgaatgaataaaagtcaatgctattggaaaaaaaaaaaaaaaa

SEQ ID NO: 102 - DNA, 1257 bp, Homo sapiens
gtcccgacgcctcccgcccccgcagttccttggagagcttggagccgcgcgccggagggaataggaaagcttggttacaacccgggacacccggagcttcaggatggttcgtactaagacatggaccctgaagaagcactttgttggctatcctactaatagtgactttgagttgaagacatctgagctcccacccttaaaaaatggagaggtcctgcttgaagctttgttcctcaccgtggatccctacatgagagtggcagccaaaagattgaaggaaggtgatacaatgatggggcagcaagtggccaaagttgtggaaagtaaaaatgtagccctaccaaaaggaactattgtactggcttctccaggctggacaacgcactccatttctgatgggaaagatctggaaaagctgctgacagagtggccagacacaataccactgtctttggctctggggacagttggcatgccaggcctgactgcctactttggcctacttgaaatctgtggtgtgaagggtggagaaacagtgatggttaatgcagcagctggagctgtgggctcagtcgtggggcagattgcaaagctcaagggctgcaaagttgttggagcagtagggtctgatgaaaaggttgcctaccttcaaaagcttggatttgatgtcgtctttaactacaagacggtagagtctttggaagaaaccttgaagaaagcgtctcctgatggttatgattgttattttgataatgtaggtggagagttttcaaacactgttatcggccagatgaagaaatttggaaggattgccatatgtggagccatctctacatataacagaaccggcccacttcccccaggcccacccccagagattgttatctatcaggagcttcgcatggaagcttttgtcgtctaccgctggcaaggagatgcccgccaaaaagctctgaaggacttgctgaaatgggtcttagagggtaaaatccagtacaaggaatatatcattgaaggatttgaaaacatgccagccgcatttatgggaatgctgaaaggagataatttggggaagacaatagtgaaagcatgaaaaagaggacacatggaatctggaggccatttagatgattagttaatttgtttttcaccatttagcaaaaatgtatactaccttaaatgtcttaagaaatagtactcataatgagtttgagctacttaataaaatacatttaagtggtaaaaaaaaaaaaaaaa

SEQ ID NO: 103 - DNA, 82027 bp, Homo sapiens
agcagtcgtgcattcccagcctcgcctcgggtgtagggattgcatagaaaagcaaaactacacagtcttgactgtgtagttttgtttttaggattagaggctcaccgattcatgtcggagatggtcagaaaaaccaactctccataggacgtcgtttcagaagcaaccttgggcttagtcccaccctttttaggcactcttgagaaatcaagtgcctagaaagatgacaactcaagcaccgacgtttacgcagccgttacaaagcgttgtggtactggagggtagtaccgcaacctttgaggctcacattagtggttttccagttcctgaggtgagctggtttagggatggccaggtgatttccacttccactctgcccggcgtgcagatctcctttagcgatggccgcgctaaactgacgatccccgccgtgactaaagccaacagtggacgatattccctgaaagccaccaatggatctggacaagcgactagtactgctgagcttctcgtgaaagctgagacagcaccacccaacttcgttcaacgactgcagagcatgaccgtgagacaaggaagccaagtgagactccaagtgagagtgactggaatccctacacctgtggtgaagttctaccgggatggagccgaaatccagagctcccttgatttccaaatttcacaagaaggcgacctctacagcttactgattgcagaagcataccctgaggactcagggacctattcagtaaatgccaccaatagcgttggaagagctacttcgactgctgaattactggttcaaggtgaagaagaagtacctgctaaaaagacaaagacaattgtttcgactgctcagatctcagaatcaagacaaacccgaattgaaaagaagattgaagcccactttgatgccagatcaattgcaacagttgagatggtcatagatggtgccgctgggcaacagctgccacataaaacacctcccaggattcctccgaagccaaagtcaagatccccaacaccaccgtctattgctgccaaagcacagctggctcggcagcagtccccatcgcccataagacactccccttccccggtcagacacgtgcgggcaccgaccccatctccggtcaggtccgtgtctccagcagcaagaatctccacatcccccatcaggtctgttaggtctccattgctcatgcgtaagactcaggcatccaccgtggccacaggtcctgaagtgcctcccccttggaagcaagagggctacgtggcctcctcatctgaggctgagatgagagagacaacgctgacaacctctactcagatcaggacagaagagagatgggaagggagatacggtgtccaggagcaagtgaccatcagtggtgctgcgggtgctgccgccagtgtgtcggccagtgctagctacgcagcagaggctgttgccactggtgctaaagaggtgaaacaagatgctgacaaaagtgcagctgttgcgactgttgttgctgccgttgatatggccagagtgagagaaccagtgatcagcgctgtagagcagactgctcagaggacaaccacgactgctgtgcacatccaacctgctcaagaacaggtaagaaaggaagcggagaagactgctgtaactaaggtagtagtggccgccgataaagccaaggaacaagaattaaaatcaagaaccaaagaagtaattaccacaaagcaagagcagatgcacgtaactcatgagcagataagaaaagaaactgaaaaaacatttgtaccaaaggtagtaatttccgcagctaaagccaaagaacaagaaactagaatttctgaagaaattactaagaaacagaaacaagtaactcaagaagcaataatgaaggaaactaggaaaacagttgtacctaaagtcatagttgccacacccaaagtcaaagaacaagatttagtatcaagaggtagagaaggcattactaccaaaagagaacaagtgcaaataactcaggagaagatgagaaaggaagccgagaaaactgccttgtctacaatagcagttgctactgctaaagccaaagaacaagaaacaatactgagaactagagaaactatggctactagacaagaacaaatccaagttacccatggaaaggtggacgttggaaaaaaggctgaagctgtagcaacagttgttgctgcagtagaccaggcccgagtcagagagcccagagagcctgggcatcttgaagaatcctatgctcagcagaccactttggagtacggatataaggaacgcatttccgccgcaaaggtagctgagcctccccaacgtccagcctcagaaccccacgttgtccctaaagcagtcaagcctagagtaatccaggctccttctgagactcatatcaaaactactgatcaaaagggaatgcacatatcatcacagatcaagaaaactacagatctaacaacggaaagattagtccatgtggataaacgcccccgcacagctagccctcactttactgtttcaaaaatttctgttcctaagacagaacatggatatgaggcatcaatagccggtagtgctattgccacattacaaaaagagttgtcagccacatcttctgctcagaagatcaccaaatcggtgaaggctcctactgtgaagcccagtgagactagagtaagggcagagcccacacccttgccacagttccccttcgctgacacaccagatacttacaagagtgaagctggcgttgaggtgaaaaaggaagtaggggtgagcatcactggcaccaccgtccgtgaagagcgctttgaagtactgcacggacgcgaagccaaggtaacagaaacagcaagagtaccagcacctgttgaaattcctgttactccaccaactttggtctcgggcttaaaaaatgtgactgtcatagaaggtgaatctgtcaccttggagtgccacatctctggatacccatccccgacagtgacatggtacagggaagactaccaaatcgaaagttccattgacttccagataaccttccagagtggaattgctcgtcttatgattcgcgaagcatttgcggaagacagcgggcgatttacttgcagtgctgtaaatgaggctggaaccgtcagcacatcctgctatctggctgtgcaggtgtcagaagaatttgaaaaggaaaccacagccgtgactgagaaatttactacagaagagaaacgctttgttgagtcaagagatgtggttatgactgatactagcctcacagaggaacaagcagggcctggagaacctgccgcgccttactttattacaaaaccagtggtccagaaactggtggaaggtgggagcgtggtgtttggatgccaagttggcggcaacccaaagccccatgtatactggaaaaaatctggtgttcctctaaccactggatacagatacaaagtgagttacaacaaacaaaccggtgaatgcaagctggtgatttctatgacttttgctgatgatgctggagaatacactattgttgttcgcaataagcatggagaaacttctgcatctgcttccttgcttgaagaagctgattatgagttactgatgaagtcccagcaagaaatgctttatcagacacaagtgactgcatttgttcaagaacctaaagttggagaaacagcacctggatttgtatactctgagtatgaaaaagagtatgaaaaagaacaagccttaattaggaagaaaatggccaaagatactgtagtggtcagaacttatgtagaagatcaggaattccatatttcttcctttgaagagagacttattaaagaaattgaatatagaataataaagactacattagaagaacttcttgaagaagatggagaagaaaagatggcagttgacatttctgaatctgaagctgttgaatcaggatttgatttaagaatcaagaattatagaattcttgaggggatgggtgtcacttttcattgcaagatgtctggatatccattaccaaagattgcttggtacaaagatggcaagcgcatcaaacatggagaaagataccaaatggactttctacaagatggcagagctagtctgcgtatacctgttgttcttccagaagatgaaggaatctacactgcatttgccagcaatattaaaggaaatgcaatttgctcagggaaattgtatgtggagcctgctgcaccacttggagctccgacttacattcccacactagagccagtgagcagaatcagatctctctctccacgttcagtgagcaggtctcctatacgcatgtctcctgcacggatgtcacctgcaaggatgtctcctgcacggatgtcccctgcaagaatgtcccctggacgtaggctggaggagacagatgagtcacaacttgagagactatataaaccagtctttgtgttaaaacctgtttctttcaaatgtttagaagggcaaactgccagatttgacttaaaggttgttggtagacctatgccagagacgttctggtttcatgatggccagcaaattgtcaatgactatacccataaagtagtcattaaagaagatggtactcaatcactaattattgtccctgccacacccagtgattctggggaatggactgtggttgcccaaaacagggcaggcagatcttcaatttcagtgattttaactgtggaagctgtggaacatcaggtaaaaccgatgtttgtagaaaaactgaaaaatgtcaatataaaggaaggttcccgacttgaaatgaaagtcagagctacgggtaaccccaaccctgacattgtatggttgaaaaacagtgacatcattgtgcctcataaatatcccaaaatcagaattgaaggaaccaagggagaagctgcccttaaaatcgattccactgtcagccaagattctgcctggtatactgcgactgctattaataaagctggcagagacactacaagatgcaaagtaaatgttgaagttgagtttgcagagcctgagccagagagaaagttaatcatcccacgggggacatatagagcaaaggagattgcagccccagaactggagcccctccatttgcgatatggccaagagcaatgggaagaaggtgatctctatgacaaagagaaacaacagaaaccatttttcaagaaaaaactcacttccttaagacttaagcgctttgggcctgcccactttgaatgcaggctaacacccattggtgacccaacgatggtggtggagtggctccatgatggaaagccacttgaagcagccaacaggctccgtatgatcaatgaatttgggtactgcagccttgattatggcgttgcatattctagagacagtggtatcattacttgcagagccactaacaaatatggaacagatcacacatctgctacccttattgttaaagatgagaaaagtcttgtggaagaatcccaattgcctgaggggaggaaaggcttacagagaattgaagaattagagagaatggctcatgaaggtgcacttacaggtgtaacaacagatcagaaagaaaagcaaaagccagacattgtcttgtacccagagccagttagagtacttgaaggggagactgcaaggttccgctgcagggtaacaggctaccctcagcccaaagtcaactggtacctcaatggacagctcatccgcaaaagcaaaaggttcagagttcgctatgatggtatccattacctggacatcgtggactgcaaatcatatgacacaggtgaagtgaaggtcaccgcggaaaatcctgaaggtgtgatagagcataaagtgaagcttgagattcaacagagggaagattttaggtctgtccttaggagagctcctgaaccaaggcctgagtttcacgtacatgaaccaggaaagcttcagtttgaagtacaaaaagtggatagacctgttgacaccactgaaaccaaagaagttgtgaagttgaaaagggctgaaagaattacccatgaaaaagtgcctgaagagtcggaagagctgcgcagtaaattcaagcgcagaacagaagagggctattatgaagccattaccgctgtggagctcaagtctcgaaagaaggatgaatcctatgaggaactcctcaggaagacaaaagatgaacttctccactggaccaaagagttaactgaagaggaaaagaaagctcttgccgaagaaggcaaaatcacgattccaacttttaaacctgacaagattgaactaagtcctagtatggaggctccaaaaatcttcgaaagaatccagagccaaacagtgggccaaggatctgatgcacacttccgggtcagagtcgtggggaaaccagaccccgaatgtgaatggtacaaaaatggtgtcaaaattgaacggtctgaccggatctactggtactggcccgaagacaatgtttgtgaattggtcataagagatgtgactgctgaggactctgccagcatcatggtaaaagccatcaacatagctggagaaacctccagtcacgcattcttacttgtccaagccaagcaattgatcactttcacacaggaattacaagatgttgttgctaaggaaaaagacactatggcaacctttgaatgtgaaacttcagaaccatttgtcaaagtgaaatggtataaagatggtatggaggttcatgagggagataaatacaggatgcactctgacagaaaggttcacttcctctccatactgaccattgatacgtctgatgctgaagattacagctgtgtacttgtggaagatgaaaatgtcaaaacgactgctaaacttattgttgaaggtgcagttgttgagtttgtgaaagaacttcaggacatagaagttccagaatcatattcaggagaattagagtgcattgtatccccagaaaatatagaaggaaaatggtatcataatgatgtggagcttaaatccaatggcaaatatacaattacatctcgtcgtggacgtcagaacctcacggtcaaggatgtaaccaaggaggaccagggagaatacagctttgtcatcgacgggaaaaagacaacctgtaaattaaagatgaaaccccgccccattgctatcctacaaggacttagtgaccaaaaagtctgtgagggtgacattgttcagcttgaagttaaagtctccttggaaagtgtggaaggcgtctggatgaaagacggccaagaagtgcagcccagtgacagggttcacattgtgatagacaaacaatctcatatgctgctcattgaagacatgactaaggaagatgctggaaattactctttcaccattccagcccttggcctctccaccagtgggcgtgtctctgtctatagtgtggacgtgataacacctctaaaagatgttaatgtgattgaaggcaccaaggctgtgcttgaatgtaaggtgtcagtccctgatgtgacttctgttaagtggtacttaaatgatgaacaaatcaagcctgatgaccgtgtacaggccattgtgaaaggtactaaacagcgactagtcattaaccgaactcatgcttcagacgaaggaccttacaagctgatagttggcagagttgaaaccaactgtaatctctctgtagaaaaaattaaaattatcagaggtcttcgtgaccttacctgtacagaaactcaaaatgtggtgtttgaggttgagctgtcccactctggaattgatgtcctgtggaattttaaggacaaggaaatcaagcccagttctaaatataaaattgaagcacatggaaaaatatataaattgacagttctaaatatgatgaaagatgatgaaggaaaatacacattttacgcgggagaaaatatcacatctggaaaacttactgtggcaggtggggccatctccaagccactcacagatcagaccgtagctgaatcccaggaagctgtgtttgaatgtgaagttgccaacccagattccaaaggcgaatggttgagggatggcaaacacctaccactgactaacaacatcagaagtgagtctgatggccacaaaaggagacttatcattgctgccaccaaattagatgacattggagaatatacctacaaggtggccacctccaaaacatctgccaaactcaaagttgaagctgtcaaaattaagaagactctgaagaacctcacagtgacagaaacacaggatgctgttttcactgtcgagcttacacaccctaatgtcaaaggtgtccagtggatcaaaaatggagttgtgctggaatccaatgaaaagtatgctatctctgtcaaaggaacaatttactctctgaggattaaaaactgtgccatcgtggatgagtctgtttatggcttcaggcttggaaggcttggagccagtgccagactgcacgtggagactgtcaagatcattaaaaagccaaaggatgtgacagccttggaaaatgccactgttgcctttgaagttagtgtttcccatgacactgttccagtaaaatggttccataagagtgtggaaattaagccaagtgacaaacacagactggtctcagaaaggaaagtccacaagctgatgctgcagaacatctccccctcagatgctggggaatacacagctgtggtcgggcaattggaatgcaaagcaaaactgtttgtggagacattacatattacaaaaaccatgaaaaatatcgaggtgcctgagaccaaaactgcctcttttgagtgtgaggtgtcccacttcaatgtcccttccatgtggctgaagaatggtgtggaaattgagatgagtgaaaagttcaagatagttgtgcagggaaaactccatcagctgatcatcatgaacaccagcacagaggactcggcagaatacacatttgtctgtggcaatgaccaagtcagtgccaccctgacagtcaccccaatcatgattacttccatgctgaaagacatcaacgctgaagaaaaagacactattacttttgaggtgacagtgaactatgaaggcatctcttacaaatggttaaagaatggtgtggaaatcaaatcaactgacaagtgccagatgagaaccaaaaagctcacacactcactgaacatcaggaatgttcactttggggatgctgctgactacacctttgtggctggaaaagcaacatcaacagccacactttatgtggaagctcgtcatatagaatttaggaaacacattaaggacattaaggtactggagaagaagcgagccatgtttgaatgtgaagtttctgaacctgacatcactgtacagtggatgaaagatgaccaggaactgcagatcacagacagaataaagattcagaaggagaaatatgtccaccgccttctgatcccatccacccggatgtctgatgctgggaagtacacagtggtggcaggaggcaacgtgtcaactgcaaaactctttgtagaaggcagagatgttcgcatccgaagtattaaaaaggaggttcaggtcattgagaaacagcgtgctgttgttgaatttgaggtcaatgaagacgatgttgatgcccactggtataaagatggcattgaaatcaatttccaagttcaagaacgacacaaatatgtagtggaaagaagaatccaccgaatgtttatctctgagaccagacagagcgatgcaggagaatacacctttgtggcaggaaggaacaggagttctgtcactctctatgtcaatgctcctgaaccgccccaagttctgcaggagctccagcctgtcactgtgcagtctggcaagcctgcccgcttctgtgccgtgatatccggaagaccacagcccaaaatttcctggtacaaggaagagcagctgctttccactggcttcaagtgcaaatttcttcatgatgggcaagagtacacgcttttgctaattgaagccttcccagaggatgcggcagtctatacctgtgaagccaagaatgactatggtgttgccacaacatcagcttcactctcagtggaagttccagaagttgtgtctcctgatcaggaaatgcctgtttatccacctgccatcatcaccccgcttcaggacactgtcacttctgaagggcagccagcccgttttcaatgccgggtttctggaacagatctaaaagtgtcgtggtacagcaaagacaagaaaatcaagccatctcggttctttagaatgactcaatttgaagacacttatcaactggaaattgccgaagcttatccagaagatgaaggaacttacacgtttgttgctagtaatgctgtaggccaagtatcaagcacagccaacctgagtctggaagctcctgaatcaattttgcatgagaggattgaacaagagattgagatggaaatgaaagagttttctagttcttttctgtctgccgaggaagaaggacttcatagcgccgaacttcaattatctaaaataaatgaaacacttgaacttttgtctgaatctccagtttactcaactaaatttgattccgaaaaggaaggcactggcccaattttcatcaaagaagtgtcaaatgctgatataagcatgggggatgtggctacactgtctgtaactgtcattggcatccccaaacctaaaattcagtggttctttaatggagtgctattaaccccttctgctgactacaaatttgtttttgacggtgatgatcatagcctgatcattctgttcaccaaattggaggatgagggagagtatacatgtatggccagtaatgactatggaaagacaatatgtagtgcctatctaaaaattaattccaaaggagagggtcacaaagacactgaaacagaatcagcagtggcaaaatctctggaaaagctgggaggtccttgtcctcctcacttccttaaggagttaaaaccaattcgctgtgctcaagggcttcctgccatctttgagtacacagtggttggagagcctgcccctactgttacatggttcaaagaaaacaagcagctttgcaccagtgtttattacactatcattcataaccctaatggctctggaactttcattgtcaatgaccctcagagggaagacagtggcctctatatctgtaaagcagagaatatgttgggtgagtccacctgtgcagcagagctgcttgtgcttctggaagacacagacatgactgataccccctgcaaagcaaagtccacaccagaggctcctgaggattttccacagacacccttaaagggtcccgcagttgaagcacttgactcagagcaggaaattgcaacgtttgtaaaagacaccattttgaaagctgctttaattacagaagaaaaccagcaactatcttatgagcatattgctaaagccaatgaattgagcagtcagcttcctttgggagctcaggaattgcaatccattttggagcaagacaagctcactcctgaaagcaccagggaatttctttgcatcaatggcagtattcactttcagcctctcaaggaaccatctcccaacctacagctgcagattgtacagtcccagaaaaccttctccaaagaaggtattctaatgcctgaagagcctgagacacaggcagttctatcagataccgagaaaatcttcccaagtgccatgtccatagaacaaattaattcattaacagttgagcctctgaaaactttattagctgaacctgaagggaattatccacagtcttcaatagaacctccaatgcattcttatctaacctctgtggctgaggaagtactttcaccaaaagaaaagacagtatctgacaccaacagagagcaaagagtgactcttcaaaagcaagaggcacaaagtgcgctcatcttgagtcagagcttagctgagggacacgtggagagtctccagagtcctgatgtcatgatctctcaggtaaactatgagcccctagtcccttcagaacactcatgcacagaaggaggtaaaattttgatagaaagtgcaaatccactggaaaatgcagggcaagattctgcggtcagaattgaggaaggcaagtccttaagatttccactagcacttgaagaaaagcaggtactgctcaaagaagagcattctgacaacgtggtgatgcccccagaccaaatcattgagtctaaaagagagcccgtggcaataaagaaagtgcaggaggtacagggaagggaccttctttctaaggaaagcttgctttctggtattccagaagagcagagattaaacctgaaaattcaaatctgccgggctttgcaagcagccgtggccagcgagcagccaggtcttttctctgagtggctaagaaatattgaaaaggtggaggtcgaggctgtaaacatcacccaagagcccagacacatcatgtgcatgtaccttgttacttcggcaaagtctgtaacagaagaagtaaccatcattattgaagatgttgatcctcaaatggctaacctgaaaatggaacttagggatgctttgtgtgctattatatatgaggaaatagacatcctaacagctgagggtcctagaattcagcaaggagccaaaacaagtttgcaagaagaaatggattctttttcaggttcacagaaggttgaacccattactgaaccagaagttgaatctaaatatctgatctcaactgaagaggtcagttattttaacgtgcaaagtagggttaaatatttggatgccacacctgtcactaaaggggttgcttcagctgttgtctctgacgaaaaacaagatgagagtctgaaaccatcagaggaaaaagaggagtcttcctctgaaagtggtactgaggaggttgctacagtaaagatacaggaagctgagggtggcttaatcaaagaggatggccccatgatacatacacctttagtggacactgtttctgaggaaggtgatattgtacacctcacaacatccataacaaatgctaaagaggtgaattggtattttgagaataaactggtgccttcagatgaaaagttcaagtgtttacaagatcaaaatacatatacgctagtcatcgacaaagtaaataccgaagaccatcaaggagagtatgtctgtgaggccttgaatgacagcggaaaaacagcaacttcagccaaactcactgtagtaaaaagagctgccccagtgatcaagaggaaaatcgaacccctggaagtagcactgggccacctagccaaattcacctgtgagatccaaagtgctcccaatgtccggttccagtggtttaaagctggccgagaaatttatgagagtgacaagtgttctattcgatcttcaaagtatatctccagccttgaaatcctgagaacccaggtggttgactgcggcgagtatacatgcaaagcttccaatgagtatggcagtgtcagctgtacagccacactaactgtgacagtgcctggaggtgaaaagaaagttcgcaaattacttccggaacgtaaacctgaaccaaaggaagaagttgttctgaaaagcgttctaagaaaaagacctgaagaagaagaacctaaagtagaacctaaaaaactagaaaaagttaaaaaacctgcagtaccagaaccaccacctccaaaacctgttgaagaggttgaagtacctactgttacaaaaagggaaaggaagattcctgaaccaacaaaagtgcctgaaatcaagccagcaatacctctccctgcacctgaaccgaaaccaaagcccgaagcagaagtgaaaacaatcaaaccacctcctgtggaacctgaaccaacccccatcgctgccccagtaacagtgccagtggttggaaagaaagcagaagccaaagcacctaaggaagaggctgccaagccaaaaggtcctatcaaaggtgtacccaaaaagactccttcaccaatagaagccgaaaggagaaagttaaggccaggaagtggtggagagaaacctcctgatgaagccccgttcacctaccagctaaaggctgtgccactgaagtttgtgaaagaaatcaaagacatcatcttgacagaatcagagttcgttggctcttcagcaatctttgaatgtttggtctccccttccactgcaattacaacctggatgaaagacggtagcaatatccgtgagagtcccaagcacaggtttattgcagatggtaaagacagaaagctgcacatcattgatgttcaactttccgatgctggtgaatacacctgtgttttacgtttgggaaacaaagaaaagacctccacggctaaacttgttgtagaagaacttcctgtgcgttttgtaaaaacactggaagaggaagtcacagtggtcaaaggacagccattgtacttgagctgcgagttaaacaaagagcgtgacgtggtctggaggaaggatggcaagattgtggtggagaaacctggccgaattgtgccaggcgtcattggcttgatgcgggctctgaccatcaacgatgcagatgacacagatgctggaacatacacagttactgtggaaaacgccaacaacctggagtgttcatcttgcgtaaaagtagtagaagtcattagagattggctggtgaaacctatacgagaccagcatgtgaaacccaaggggacagctatttttgcctgtgatatagcaaaagatactccaaacattaagtggttcaaaggatatgatgaaatccctgcggaaccaaatgataagactgaaatactgagagatggaaatcatctgtacctcaaaattaagaatgctatgccagaagatattgctgagtatgcagtggaaattgaaggaaaaagataccctgcaaagctgacacttggagagcgtgaagttgaactgcttaaaccaatagaggacgttaccatttatgagaaagaaagtgcaagctttgatgcagaaatctcagaggcagacattcctggacaatggaaactgaaaggagaacttctaaggccctcacctacttgtgaaatcaaagcagaaggtggaaaacgcttcttaactttgcacaaagtcaaactggaccaagctggtgaagtcctctaccaggcccttaatgcaattacaactgccattttgacagtaaaagaaatcgaacttgactttgctgtgcccctgaaggatgtcactgttccagaaaggcgacaggctcgattcgaatgtgtcctcacccgagaggcaaatgttatatggtccaaaggacctgatataattaagtcatctgacaaatttgatatcatcgctgatggaaagaaacatattcttgttattaatgattctcaatttgatgatgaaggggtctatactgctgaggtggagggcaagaagacctcagctcggttgtttgtcacaggtataagactgaaattcatgtcacctcttgaagatcaaacagtaaaagaaggtgaaacagcaacttttgtttgtgaactttctcatgaaaaaatgcatgtagtctggttcaaaaatgatgccaaactccatacaagcagaacagtactcatctcttctgagggcaagactcacaaattggaaatgaaagaagtgacattggatgatatatctcagataaaagctcaagtcaaggagctgagctccacagcacagctgaaggtcttagaggccgatccctacttcactgtgaaattacatgacaaaactgcagtggagaaggatgagattactttgaagtgtgaagtgagcaaagatgtaccagtgaaatggttcaaagatggtgaagagattgtcccttcacccaaatattctatcaaggcagatggcctgcgccgcatcttaaaaatcaaaaaggcggaccttaaagataaaggcgaatatgtgtgtgactgtggcacagacaagaccaaggcaaatgttactgttgaggctcgactaataaaagtggaaaagcctctgtacggagtagaggtgtttgttggtgaaacagcccactttgaaattgaactttctgaacctgatgttcacggccagtggaagctgaaaggacagcctttgacagcttcccctgactgtgaaatcattgaggatggaaagaagcatattctgatccttcataactgtcagctgggtatgacaggagaggtttccttccaggctgctaatgccaaatctgcagccaatctgaaagtgaaagaattgcctcttatcttcatcacacctctcagtgatgttaaagtcttcgagaaagatgaggctaagtttgagtgtgaagtatccagggagcccaaaacattccgttggctaaaaggaacccaggaaatcacaggtgatgacagatttgagcttataaaggatggcactaagcattcaatggtgatcaagtcagctgcttttgaagatgaagcaaaatacatgtttgaagctgaagataagcacacaagtggcaaactgatcattgaaggaatccggctcaaattcctcacccctctcaaagatgtaactgccaaagagaaggaaagtgctgtatttactgtggagttatctcatgataacatccgagttaaatggttcaagaatgaccagcgcctacacaccaccaggtcggtctcaatgcaagacgaagggaaaactcattcgatcacattcaaagacctgtctattgatgacacctcccaaattagagtagaagctatggggatgagttcagaagctaaactcactgtgcttgagggagacccatattttacaggaaaacttcaagattatactggtgtagagaaagatgaagttattctacagtgtgaaattagcaaagcagatgcaccagtgaaatggtttaaggatgggaaggaaataaagccatccaaaaatgctgttattaaggcagatggcaagaaacgcatgctaatcctaaagaaagccttgaaatcagatattggacagtacacctgtgactgtgggacagataagacctcaggaaaacttgacattgaggatcgggaaattaaactggtgcgacccctgcacagtgtggaggtgatggagactgagacagcacgctttgaaaccgaaatctctgaagatgatatccacgccaactggaaactcaagggagaggccctactccaaacacctgattgtgaaattaaggaagaaggcaaaatacactcccttgttttgcacaactgtcgcctggaccagacgggtggggtggatttccaagctgccaatgttaaatctagtgcccacctccgagttaagccacgagtaattggtcttctgaggcctttaaaggatgtcaccgtgactgcaggggaaacagccaccttcgactgcgagctctcctacgaagatatcccagtggaatggtatctcaaagggaagaaactagagcccagcgataaggtggtcccacgttcagaaggaaaagttcatacacttactctgagggatgtaaagttagaagatgctggggaagtccaactaacagcaaaagatttcaaaactcacgccaacctctttgtgaaagaacccccagttgaattcactaagcctcttgaggaccagacggtcgaagagggagccactgcagtgctggagtgtgaagtctccagagaaaatgctaaggtgaaatggttcaaaaatgggacagaaatcctcaaaagcaagaagtatgaaattgttgctgatggcagggtcagaaaacttgttatacatgactgtaccccagaggatattaaaacatacacttgtgatgctaaggattttaagacttcctgtaacctgaatgtcgtgcctcctcatgtggaattcttaagaccactcaccgaccttcaagttagagaaaaagaaatggctcgatttgagtgtgaactttcccgagaaaatgctaaggttaagtggtttaaagatggtgctgaaattaaaaagggcaaaaaatatgacatcatatccaagggagcagtgcgcattcttgtcatcaacaaatgtctactggatgatgaagctgaatattcctgtgaagtaaggacagcgagaacttctggcatgctgacagttctggaagaagaagctgtctttaccaaaaatcttgccaacattgaagttagtgaaacagacactataaaactggtttgtgaagtctccaaacctggcgcagaagtgatttggtataaaggggatgaggagatcattgaaacaggaagatatgaaatactgactgaaggacggaagagaatcctggtcattcagaacgctcaccttgaggatgctggcaactacaactgtcgactcccaagctctcgaaccgatggcaaagtcaaagtacatgaactggctgctgaatttatctcaaagcctcaaaaccttgaaatacttgaaggagaaaaggctgaatttgtctgctctatatcaaaagaaagctttccagtccagtggaagagggatgataagacacttgaatctggagataaatatgacgttattgctgatggtaaaaagagggtcctagttgtgaaagatgccacattacaagatatgggcacttacgttgtcatggtaggggccgccagagcagcagctcacttgacagtcattgaaaaactcaggatcgtagttcctcttaaggacacccgggtgaaggaacaacaggaagttgtcttcaactgtgaagtcaatactgaaggtgccaaagccaaatggttcagaaatgaagaagctatatttgatagttcaaaatacatcattctccaaaaagacctagtctacaccctcagaattagagatgcacacttagatgaccaagccaactataatgtgtctttgaccaatcacagaggtgaaaatgttaaaagtgcagccaatctaatagtagaagaggaagaccttaggattgttgagcctcttaaagatattgaaacaatggagaagaaatctgtcacattctggtgcaaggtgaatcgtctcaatgtaacactgaagtggaccaaaaatggtgaagaagtgccttttgacaaccgtgtctcatacagagttgataagtacaagcacatgttaaccattaaagactgtggcttcccagatgaaggtgaatacattgtcactgctggacaagataaatctgttgctgagcttctcatcatagaagccccgacagaatttgtggaacacttggaagatcagacagtcactgagttcgatgacgctgtcttctcctgccagctctccagagagaaagccaatgtaaaatggtacagaaatgggagagaaatcaaagaaggcaaaaaatacaaatttgaaaaagatggaagtatacacagactcattataaaagattgcaggctggatgatgagtgtgaatatgcttgcggggtagaagacaggaagtctcgtgctagactttttgtggaagaaattcctgttgagatcatcaggcctccacaagatattcttgaagcccctggtgctgatgttgtctttttagcagaactcaataaagataaggtggaagtccaatggctaagaaataacatggttgttgtccagggtgataaacaccagatgatgagtgaaggaaagatacatcgactacagatttgtgatattaagccccgtgaccagggtgaatacagatttattgccaaagacaaagaagccagagctaagcttgaactggcagctgcaccaaaaatcaagacagctgaccaagaccttgtggttgatgttggcaagcctctgacaatggtggtgccatatgatgcctaccccaaagcagaagctgaatggtttaaagaaaatgaacctttatctacaaaaaccattgatactacggctgaacaaacttctttcagaattttagaagccaagaaaggagacaaagggaggtataaaattgtgcttcagaacaaacatggaaaagcagaaggattcatcaatttaaaagttattgatgttcctgggccagtacgtaacttagaagtgacagaaacatttgatggtgaagtgagccttgcttgggaagaacctttaactgatggtggaagcaaaatcataggttacgttgttgaaagacgtgacattaagagaaagacctgggttctggccacagaccgtgcagagagttgtgagtttactgtcactggtctacagaaaggaggagttgagtacctattccgtgtgagtgcaagaaacagagttggcactggtgagccagtagaaactgacaatcctgtagaagcaaggagtaaatatgatgttccaggccctcctttgaatgtaaccatcactgatgtgaatcgatttggtgtctcactgacatgggaaccaccagagtatgatggaggtgctgagatcacaaactacgtcattgaattaagagacaagacttctatcaggtgggatactgccatgactgtgagagctgaagacctgtctgcaactgttactgatgtggtagaaggacaggagtacagtttccgagtgagagcccaaaatcgaattggagttggaaaaccaagtgcagccacacccttcgtcaaagttgctgatccaattgagagaccaagtcctcctgtaaacctaacttcctcagatcagactcagtcatcagttcagctcaaatgggaacctcctctgaaagatggaggaagcccaatattaggctatataattgagcgatgcgaagaaggaaaagataattggattcgttgcaatatgaaacttgtccctgaactgacttacaaggttaccggattggaaaaaggaaataaatatttatatagagtatctgcagaaaataaagctggtgtttcagatccatctgaaattcttggtcctctcaccgctgacgatgcatttgttgaaccaacaatggatttaagtgcatttaaagatggtctggaagttattgtcccaaatcctatcacgatcctggttccaagtacaggctatccaaggccaactgcaacctggtgttttggagataaagtactagaaacaggggaccgggtgaaaatgaagaccttgtctgcctatgccgaacttgtcatttctccaagtgaacgttcagacaagggcatttatacactgaaattagaaaaccgtgtgaaaacaatttctggggaaattgatgtcaatgtaattgctcgcccaagtgcacccaaagaattgaaatttggtgatataaccaaggactcagtacatttgacttgggaaccacctgatgatgatggaggaagtccgttaactggatacgttgttgaaaaacgagaagtcagccggaaaacatggactaaagttatggactttgtgactgatctagaattcacagttcctgatcttgttcaaggaaaagagtacttatttaaagtttgtgctcgtaacaaatgtggccctggagaacctgcatatgttgatgaacctgtaaatatgtcaactcctgcaacggtacctgacccaccagagaatgttaaatggagagatcgaacagccaatagcatcttcttaacatgggatccacctaaaaatgatggtggttcacgcatcaaaggatatatagttgaaagatgtccacgtggttctgataaatgggttgcctgtggagaacctgttgcagaaacaaaaatggaagtgacaggtcttgaggaaggcaaatggtatgcctaccgcgtgaaggccttaaacaggcagggtgctagcaaaccaagcagacccacagaggaaatccaggctgtggacacacaagaggccccagaaatcttcctcgatgtgaagctccttgctggtctcactgtaaaagctgggaccaagattgaacttcctgccaccgtaaccggaaaacctgaacctaaaataacttggacaaaggctgatatgattctgaagcaggacaaaagaattaccattgaaaatgtccctaagaaatccacagtgactattgttgatagtaagagaagtgacactggcacatatatcattgaggctgtgaatgtgtgtggccgggccactgctgtggtggaagtgaacgtcttagataaacccggaccaccagctgcctttgacatcacagatgtaaccaatgagtcatgtcttctaacatggaacccaccacgcgatgatggtggatctaagatcacaaactatgttgtggagagacgagcaactgatagtgaagtgtggcacaagctctcatccaccgtcaaggatacaaacttcaaggccaccaaattaatccccaataaagagtacatcttcagagttgctgcagaaaacatgtatggtgttggtgaaccagttcaggcctctccaataacagccaaatatcagtttgatccacctggtcctccaactcgcctagaaccttctgatatcactaaagacgcagtgactctcacatggtgtgagccagatgatgatggtggcagcccaatcacaggatactgggttgaaagactggatcctgatacagataaatgggttagatgcaataagatgccagtaaaggacacaacatacagagtgaaaggtctcactaataagaaaaaatacagattccgtgtgttggctgaaaatcttgctggacctggaaaaccaagcaaatcaactgaaccaatcttaataaaggatcccatagatcctccatggccccctggaaaaccaactgtaaaagatgtaggcaaaacatcagtaaggttgaattggacaaaaccagaacatgatggaggtgcaaagattgagtcttatgtcattgaaatgctgaagactggaacagatgagtgggtcagagtggcggaaggggttcccaccactcagcacttgctcccagggctcatggaaggacaggaatactcattccgagttagagctgtgaataaggctggggaaagtgaacccagtgaacccagtgaccctgtgctttgccgggagaagctatatcctccatcaccaccacgctggcttgaagttattaatatcacaaaaaatacagcagacctaaaatggacagttcctgagaaagatggagggtcccccatcaccaactacattgtggaaaagagagacgtcaggcgaaaaggctggcaaacagtggataccactgtcaaggacaccaagtgcacagtcaccccactgactgagggctctttatatgtgttccgagttgctgcagaaaatgctataggacaaagcgactacaccgaaattgaggactctgtgctggccaaagacacctttaccactcctggaccaccctacgccctggcagtggttgatgtgacaaaacgacatgttgacctaaagtgggagccacctaaaaatgatggtggaagaccaatacagagatatgtcattgagaagaaagaaaggttaggtacccgttgggtgaaagctggaaagactgcaggacctgactgtaacttcagagtaactgatgtcatcgaaggaacagaggtccagtttcaggttcgggctgaaaatgaagctggagttggccacccaagtgaacccacagaaatcctatccattgaagatccaacaagtcctccctcaccaccccttgacctacatgtgactgatgctgggagaaaacacattgccattgcttggaagcctccagagaaaaatggtggaagtcctatcataggataccatgttgaaatgtgtccagtaggcactgagaaatggatgagagttaattctcgcccaataaaggacttgaaattcaaggttgaagaaggtgttgttcctgacaaagaatatgtcctgagagtgagagcagtcaatgctattggtgtcagcgagccatctgaaatctctgaaaatgtggttgccaaagacccagactgcaagccaacaattgacctggagactcatgacattattgttattgaaggtgaaaagttaagcattcctgttcccttcagagctgtcccagttccaactgttagttggcataaagatggcaaagaagttaaagcaagtgatagattaacaatgaagaatgatcacatctctgcacaccttgaagttcccaagagtgtccgtgcagatgccggaatttataccattacactggagaataagctcggctcagcaacagcctcaatcaatgtcaaagtcataggcctacctggaccatgcaaagatattaaagcaagtgacattaccaagagttcttgtaagttaacttgggaacctccagaatttgatggtggaaccccaattcttcattatgtcctggagcgcagagaagctgggaggagaacatatataccagtcatgtctggtgagaacaaactgtcatggactgtgaaggatctcataccaaatggtgaatacttcttccgtgttaaagcagtcaacaaggttggtggaggagaatatattgaactgaaaaatccagtcattgctcaagatccaaagcaaccccctgatccacctgtagatgtagaggttcataatcctacagcggaggcaatgactattacatggaagccacctttgtatgatggagggagcaagataatgggctacatcatagagaagattgctaagggtgaagaaaggtggaagagatgcaatgaacacctggtaccaatcctgacctatacagcaaaaggacttgaagaggggaaagagtaccaattccgtgtgcgagcagagaacgccgcgggtattagtgaaccttctcgggctactcctccaaccaaagctgtagatcccattgatgcccccaaagtcattctgagaacaagcctagaagtgaaacgaggtgatgaaatagcacttgatgcaagtatttctggatcaccttacccaactattacatggataaaggatgaaaatgttattgtaccagaggaaattaagaagcgtgcagcacccttggttaggagaaggaagggtgaagttcaagaagaagaaccatttgtcctgcctctgacacagcgtttgagtattgacaacagcaaaaagggagaatctcagctacgcgtccgagattctctccgacctgaccatggtctgtatatgatcaaagttgaaaatgaccacggtattgcaaaagctccttgtactgtcagtgtgttagatacaccgggaccaccaatcaactttgtatttgaagatatcagaaagacctcagtcctttgtaaatgggaaccaccccttgatgatggtggcagtgaaatcataaactacactttggaaaagaaagacaagacaaaacccgactcagaatggattgttgtcacttcaacacttagacattgcaaatattcagtaacaaaactgattgaaggaaaagagtacctcttccgtgtaagagctgaaaacagatttgggccaggtccaccatgtgtttcaaagccacttgtggctaaagatccatttggaccacctgatgcaccagataagcccattgtggaagatgttaccagcaacagtatgctagtgaaatggaatgaaccaaaagataatggaagccccattttgggttactggcttgaaaaacgtgaagttaacagtacacattggtctcgtgtcaacaaaagccttctgaatgccttgaaagccaatgtagatggcttattagaaggactcacctatgtcttcagagtatgtgctgaaaatgcagctggacctggaaagttcagtccaccttcagatcccaaaacagcacatgatccaatctctcctcctgggccacctatcccaagagtcactgacacaagctctacaactattgaactagaatgggaacccccagctttcaatggtggtggggaaattgttggctattttgttgataagcagttggttggcacaaatgaatggtcacgctgcacagagaagatgatcaaggtccgtcagtacaccgtcaaagaaatccgagagggtgctgattacaaacttcgggtgagtgctgtcaatgccgcaggggaaggaccgcctggagaaacacaacctgttactgtggctgaaccacaagagcctccagctgtggaactggatgtttctgtcaagggtggaatacaaataatggctgggaagactcttagaattccagctgtggtgactggtcgccctgtacctacaaaagtatggaccaaagaagaaggggagctggataaagaccgtgttgtaatagacaacgttggaaccaaatctgaactaattatcaaggatgcactgcgaaaagaccatggcagatatgtgattacagctacaaatagctgtggttccaaatttgcagcagccagggtagaagtttttgatgtccctggtccagttcttgacttaaaacctgttgtaacaaacagaaaaatgtgtctacttaactggtctgatccagaagatgatggaggaagtgaaataacaggctttatcattgaaagaaaagatgccaagatgcatacttggagacaaccaatagagactgagagatctaaatgtgacatcacaggtctgcttgagggacaagaatataagttccgtgttattgccaagaacaagtttggctgtggccctcctgttgaaataggaccaattcttgcagttgatccactaggtcctccaacatctccagagaggctcacatacactgaaaggacaaagtccactatcacacttgactggaaagagccccgcagtaatggtggcagtcccatccaaggatatatcattgaaaaacggcgtcatgacaaacctgactttgaaagagttaacaagcgactctgcccaaccacatcttttctggttgaaaatcttgatgaacaccaaatgtatgagttccgtgtcaaagctgtcaatgaaattggtgaaagtgaaccatccctacctcttaatgtagtcatacaagatgatgaagtgcctccaactattaagttgcgtctgagtgttcgaggagacactatcaaagttaaggcaggagagcctgtccacatccctgcagatgtgacaggccttccaatgcctaagattgaatggtccaaaaatgaaactgtaattgaaaaacccactgatgcacttcagataaccaaggaagaggtatcccgaagtgaggcaaaaactgagcttagcattcccaaagcggtccgggaggacaaaggcacttacacagttactgcttccaatcgccttggctcagtgttccgaaatgttcacgttgaagtatatgaccgcccatccccaccaagaaatcttgctgttactgacattaaagctgaatcttgctacttgacatgggatgcccctcttgataatggtggcagtgaaatcacccattatgttattgacaaacgtgatgcaagtaggaagaaagcagaatgggaggaagtcaccaacactgctgtagagaaaagatatgggatctggaaacttatccccaatggtcagtatgagttccgagtcagggcagtgaataaatatggaatcagtgatgagtgcaaatcagataaagtagtcattcaagatccttatcgccttcctggacctccaggaaaaccaaaagttttggcacgcaccaaaggatcaatgctagtgagctggactcctcctttggacaatggtggctctccaattactggctactggctggagaaaagagaagagggaagtccttattggtcacgtgttagccgagcaccaataaccaaagtgggattgaaaggcgtggaatttaatgttcctcgtttgcttgaaggcgttaaataccagttcagagccatggcaataaatgctgcaggaattggtcctcccagtgaaccatcagatccagaggttgcaggagatcccatatttccaccggggccaccttcttgcccagaagttaaagataaaacgaagtcaagcatctcactaggatggaaacctccagccaaagatggtggcagcccaatcaaaggatacattgtagaaatgcaagaagaaggtactactgactggaaaagagtaaatgaaccagacaaacttataactacctgtgaatgtgtggtgcctaatctgaaagagctcaggaagtacagattcagagtgaaagctgtcaatgaagctggtgaatctgaaccaagtgatacaactggggagatccctgccactgatattcaagaggaaccagaagttttcattgacattggagcacaggactgtctggtttgtaaagctggctcacagattaggattcctgctgtcatcaagggacgcccaacaccaaaatcatcttgggaatttgatggaaaggcaaagaaagcaatgaaggatggagttcatgacatacccgaagatgcacagctggagactgctgaaaactcctcagtaattattattccggagtgtaaacgatctcatacaggcaaatacagcatcacagccaagaataaagcaggacaaaagactgcaaattgcagagttaaagtcatggatgtaccaggcccacccaaagatctgaaagtcagtgatatcacaaggggtagttgcagactttcatggaagatgccagacgacgatggaggagacaggatcaaaggctatgttattgagaagaggactattgatggaaaagcctggaccaaagtcaatccagactgtggaagcaccacatttgtagtgcctgatctcctctctgaacagcaatatttcttccgtgtgcgagcagaaaaccgttttggtattggcccacctgtggaaaccattcagaggaccactgccagagatccgatatatcctcctgatcctcctattaaactcaagattggcctcatcacaaagaacacagtgcatctgtcatggaaacccccgaagaatgatgggggctcccctgttacccactatattgttgagtgccttgcatgggaccctactgggacaaagaaagaagcctggaggcagtgcaataagcgtgatgtggaagaactgcaatttactgttgaagacctagtagaaggtggggaatatgaattccgagtcaaagctgtcaatgctgcaggagtcagcaagccttcagccactgttgggccctgtgactgtcaaagaccagacatgccaccatcaattgatctaaaagaattcatggaggttgaagaaggaaccaatgttaacattgtggccaaaattaaaggtgtgccattcccgacactaacctggtttaaagctcctccaaagaagcctgataacaaagaacctgttctctatgacacccatgtcaacaaactggtggtagatgatacttgcactttagttattccgcagtctcgcaggagtgacactggcttatataccatcacagctgtaaataatctgggaacagcatcaaaggagatgagactgaatgtcctgggtcgtcctggccctccagtgggacccataaaatttgaatctgtttcagcagatcaaatgacactatcttggtttccacctaaagatgatggtgggtctaagattacaaactatgtaattgagaaaagagaagctaacaggaagacatgggtccatgtctccagtgaacctaaggagtgcacgtacacgattcccaaattgctagaaggccatgaatatgtattccgaatcatggcccagaataaatatggcattggagaacctcttgacagtgaacctgaaacagcaagaaacctcttctctgtccctggagcaccagataaaccaacagttagcagcgtgactcgtaactccatgactgtcaactgggaagagccagaatatgatggaggctctcctgtgacagggtactggctggaaatgaaagacaccacttcaaagagatggaagagagttaaccgagatcctatcaaagccatgactttgggtgtttcttataaagtgactggtcttattgaaggttccgactatcaattccgggtatatgcaatcaatgctgctggcgtgggtccagcaagtctgccatcagacccagcgactgctagagatccaattgcccctcctggtcctccatttcccaaagtgacagattggactaaatcatctgcagatctggagtggtctcccccactaaaagatggtggatccaaagtaactggatacatcgttgaatataaagaagaaggaaaagaagaatgggaaaagggtaaagataaagaagtgagaggaacaaagctcgttgtgacaggattaaaggaaggagcattctacaaatttagagttagtgcagtcaacattgctggcattggagaacctggagaggtcacagatgtcattgaaatgaaggacagacttgtttcacctgaccttcagctagatgccagtgtcagagatagaattgttgtccatgctggaggggtgatccgaatcattgcctatgtgtctggaaagcctcctccaaccgtcacctggaacatgaatgaaagaaccttacctcaagaagccaccattgagaccacagccattagctcatccatggtcatcaagaactgccagaggagccatcaaggcgtctattctcttcttgccaaaaatgaagccggagaaagaaagaagacaattattgttgatgtattagatgttccaggtcccgttggaacaccattcctagctcacaacctaaccaatgagtcctgcaaactgacatggttttctccagaagatgatggaggctctccaatcaccaattatgtcattgaaaagcgtgaatctgaccgcagagcatggaccccagtgacatatacagttacccgacaaaatgctactgtccagggtctcattcaaggaaaagcctactttttccgaattgcggctgaaaatagtattggcatgggtccatttgttgagacatcagaggcacttgttatcagagagccaataactgtaccagagcgtcctgaagacctggaagtcaaagaagttactaaaaatactgtaactttgacttggaatcctcctaagtatgatggtgggtcagaaattattaactatgtcctagaaagtcggctcattgggactgagaagttccacaaagttacaaatgacaacttgcttagcagaaaatacactgttaaaggcttaaaagaaggtgatacctatgagtaccgtgtcagtgctgtcaacattgttggacaaggcaaaccatcattttgcaccaaaccaattacttgcaaggatgagctggcacccccaacgcttcacctcgacttcagagataagctcacgattcgagttggtgaagcttttgccctcactggccgttactcaggcaaaccaaagcctaaggtttcctggttcaaagatgaagctgatgtgctggaagatgatcgcactcatataaagactacaccagcaacacttgctttagagaagatcaaggccaaacgttcagattccggcaaatactgtgtggttgtggagaacagtacaggctctaggaaaggtttctgtcaagttaatgttgttgaccgtcctggaccaccagtaggaccagttagttttgatgaggtgaccaaagattacatggttatctcttggaagcctcctttagatgatggaggcagtaaaatcaccaattatattattgagaagaaggaagtgggtaaagacgtctggatgccagtgacatctgcaagtgctaaaacaacatgcaaagtttctaaactacttgaaggaaaagattatattttccggatacatgctgaaaatctgtatggaataagtgatcctctggtgtctgattcaatgaaagccaaagatcgtttcagggttcctgatgcacctgatcagccaattgttacagaagttaccaaagactctgcattagtaacctggaataagccacatgatggaggaaaacccatcacaaactacatcctggaaaagagagaaactatgtctaaacgatgggctagagttaccaaagatcctattcatccatacactaaatttagggttcctgatcttctagaaggatgtcagtatgaattccgggtttctgcagaaaatgaaattggtattggagatccaagcccaccatccaaaccagtctttgctaaagatccaattgctaaaccaagtccacctgttaatcctgaagcaatagatacaacatgcaattcagtcgatctaacttggcagccaccacgtcatgatggtgggagcaagattctgggttatattgttgagtaccagaaagttggagatgaagagtggagaagagccaatcacacccctgagtcatgtcctgaaactaaatataaagtcaccggtcttcgggacggtcaaacctataagtttagagtgttagcagtcaatgcagctggtgaatcagatccagctcatgttccggagccagtcctagtaaaagacaggcttgaaccccctgagttgattcttgatgccaacatggcaagagaacaacacattaaagttggtgatactctaagacttagtgccatcatcaaaggagtgccattcccaaaagtaacttggaaaaaagaagacagagatgctccaactaaagcaagaattgatgtgactccagttggtagcaagcttgaaattcgtaatgctgcccatgaagatggtggaatttattctttaacagtggagaatccagctggttcaaaaactgtctcagtaaaagtacttgtattagataaacctgggccacctagagatctggaagtcagtgaaattaggaaagattcatgttaccttacttggaaagaaccactggatgatggtggttctgttattaccaattatgtggttgagaggagagatgttgccagcgcccagtggtcacctctctcagctacatcaaagaaaaagagtcacttcgctaagcatctgaatgaaggcaaccagtacctcttccgagtagctgcggagaaccagtatggacgtggtccttttgttgaaacaccaaaaccaatcaaggctttggatcctctccatcccccagggccacccaaggacctgcaccatgtagatgttgacaagactgaagtctccctagtctggaataagccggatcgtgatggtggttctccaatcactggatatttggtagaatatcaagaagaaggcacccaggactggattaaatttaagactgtgacaaacttagagtgtgtggttactggactacaacaaggaaagacctatagattccgtgtaaaagctgaaaacattgtgggtcttggtctccctgacacaactatcccgatagaatgtcaagaaaaactagtgcctccatccgtggagctagatgtgaaattaattgaaggtcttgtggtaaaggctggaaccacagtcagattccctgctattataagaggtgtgcctgttcctactgcaaagtggacaaccgatgggagtgagattaaaaccgatgagcactacacagttgaaacagacaacttctcatcagtacttaccattaagaactgcttaaggagagacactggggaatatcaaatcacagtttccaatgcagccggtagcaaaacagtagccgtacatcttactgttcttgatgttcctgggccaccaacaggtcctattaatattctggatgttactcctgaacacatgactatctcatggcagccacctaaggatgatggaggaagccctgtgataaattatattgttgagaaacaagatacaaggaaagacacgtggggtgttgtctcttccggaagcagtaagacaaagctgaaaatcccacatctgcagaagggctgtgaatatgttttccgagttagagcagagaataagataggtgttggtcctccccttgactccacacctactgttgctaagcataaatttagtcctccgtctcctcctggtaaaccagtggttactgacattactgaaaatgcagcaacagtgtcttggaccctgccaaaatctgatggtggcagtccaataactggctactatatggaacgtcgagaagtaactggcaaatgggtgagggtcaacaaaacacctatcgctgacctgaagttcagagtgactggactctatgaaggaaatacatatgagtttagagtttttgctgaaaatcttgcaggactaagcaaaccatccccaagttctgatccaataaaagcttgccggcccatcaaaccacctggaccacctattaatcctaaactgaaagacaagagcagagaaacagctgatttggtgtggacaaagcctctcagtgatggtggtagccccattctaggatatgtagtggaatgtcagaaacctggcacggcacaatggaacaggattaataaagatgaactcattaggcaatgtgcctttagggtacctggactaattgaaggaaatgagtacagattccgtataaaggcagctaatattgtaggagagggtgagccaagagaactagcagaatctgtgattgcaaaagatatccttcatcctccagaagtagaacttgatgttacttgtcgtgatgttattaccgtgagagtaggccaaactatccgcattctagctcgagtcaaaggcagacctgaaccagacataacttggactaaggaaggcaaagtattggtccgagaaaagagggtggaccttattcaggatctacctcgtgttgagttacaaattaaagaagctgttagagctgatcatggcaagtatatcatctcagctaagaacagcagtggacatgcccaaggttcagccatcgttaacgtccttgacagacctgggccttgccagaatttgaaggttaccaatgtaaccaaagagaactgtacaatttcttgggaaaacccactagataatggtggctcagaaataacaaacttcatagtagaatatcgcaaaccaaaccagaaaggctggtcaattgttgcatcagatgtcactaaacgattaatcaaggccaaccttttagccaacaatgaatactatttccgagtttgtgcagagaataaagtaggtgttgggccaaccatcgaaacaaaaactcccattctggctattaaccctattgacagaccaggtgagcctgaaaaccttcacattgcagataaaggaaagacatttgtctatctaaagtggcggaggcctgactatgatggtggcagtccaaatctgtcatatcatgttgagagaaggcttaagggctccgatgactgggaaagagtgcataaaggaagcattaaagaaactcactacatggttgacagatgtgttgaaaaccagatttatgagttcagagtgcaaacaaagaatgaaggtggggaaagtgactgggtgaagacagaggaagttgttgtgaaagaagacttacaaaaaccagtacttgatctgaaattaagtggggtcctaactgtcaaagcaggggacaccattaggcttgaggcaggggttagaggcaaaccattcccagaagttgcatggaccaaggacaaagacgctacagacttaacaagatcaccaagggtcaagattgatacccgtgctgattcatctaaattttctcttactaaagcaaagcgaagtgatgggggtaaatatgtagttacggcaactaacacggctggcagttttgtggcctatgccactgtcaatgttttagataagcctggtcctgtgagaaatctgaaaattgttgatgtgtccagtgataggtgtactgtttgctgggatccaccagaagatgatggtggctgtgaaatccaaaattatattctagaaaaatgtgagacaaagcgaatggtttggtctacctattctgctactgtcttgacacctggtactacagtaacacgtctcatagaaggaaatgaatatattttcagagtccgtgcagaaaataaaataggcacagggcctccaacagaaagtaaaccagtcatagccaaaaccaagtatgataaacctggtcgccctgatcccccagaagtcactaaagtaagcaaagaagagatgactgtggtttggaatccacctgaatatgatggtggaaagtctataactggatactttttggagaaaaaggaaaagcattcaacacgatgggtccctgtcaacaagagtgcaatccctgagagacgtatgaaagtacagaatctcctcccagaccatgaatatcagttccgtgtcaaggcagaaaatgaaattggaattggagaaccaagcttgccttcaagaccggtggtggcaaaagaccccatagagccacctggtccaccaaccaatttcagagtggttgatacaaccaaacattccataactcttgggtggggaaaaccagtctatgatggtggtgcaccgatcattggatatgttgtggaaatgagaccaaaaatagcagatgcgtctcctgatgaaggctggaaacggtgtaatgctgcagcacagcttgtacgcaaggaattcactgttaccagcttggatgaaaaccaggaatatgagttcagggtgtgtgcccaaaaccaagttggtattgggcgccctgcagagctaaaggaagctatcaaacctaaagaaatactagaacctccggagattgatttggatgccagcatgaggaaactggtcatagtgagagcaggatgccctattcgtctctttgctatagtgagaggacgaccagcccctaaagtcacttggcgaaaagttggcattgataatgtggtcagaaaaggacaagttgatctggttgacactatggccttccttgtcatccccaattctacccgtgatgactcaggaaaatattccttaacacttgtgaacccagcaggagaaaaggctgtattcgtaaatgtcagagtattagacactcctgggcctgtgtctgatttaaaagtttcagatgtcactaaaacatcatgccatgtgtcctgggcccctcctgaaaacgacggtgggagccaagtgacacattatatcgtggagaaacgtgaggcagacagaaagacatggtcgaccgttaccccagaagttaagaaaacaagcttccatgtaaccaatcttgtccctgggaatgagtattacttcagagtaactgctgtcaacgaatatggccctggcgtcccaacagatgtcccaaaaccagtgcttgcatcagatcctctaagtgagccggatcccccaaggaaattagaagtgactgaaatgaccaagaacagtgccaccttagcctggttacctcccctacgtgatggaggtgctaaaatcgatggctacatcactagttacagagaagaagagcagcctgcagatcgctggacagagtactcagtggtaaaagatctgagccttgttgtcactggcctaaaggaaggaaagaaatacaaatttagagtagcggccagaaatgctgttggagtcagtttgccaagagaagctgaaggagtgtatgaagccaaagaacaactgttgccaccaaagatccttatgccagagcaaataactatcaaagctgggaaaaaactccgaattgaagcccatgtgtatggaaagcctcatcccacctgtaaatggaaaaaaggagaagatgaagttgtcacatccagccacctggcagtgcataaagcagacagctcttcaattctgatcataaaagatgtgactaggaaagacagtggttactacagcctcacagcagagaacagttctgggacagacactcagaaaatcaaagttgtagtcatggatgcccccggcccccctcagcctccatttgacatttctgatatagacgctgatgcttgctccctgtcatggcacatccctctggaggacggaggcagtaacatcaccaattatatagtggagaagtgtgatgtaagccgaggtgactgggtcacggctctagcttcagtcacaaaaacttcctgcagggttggaaagctgatcccaggccaggagtacatcttccgggtccgtgctgaaaaccgatttggcatttcagagcctctcacatctccaaagatggttgcgcagttcccatttggtgttcctagtgaaccaaagaatgcacgagtcaccaaagtcaacaaggactgtatttttgttgcttgggacagaccagatagtgatggagggagccccattattggttatctgattgaacgcaaggaaagaaacagtttgctgtgggtgaaagccaatgatactcttgtccggtcaactgaatatccttgtgctggccttgtagaaggtcttgagtattcattcagaatctatgccctaaacaaagctggatccagcccacccagcaaacccacagaatatgtaactgcaagaatgccagttgatcctcctgggaaacctgaggttattgatgtcaccaagagtactgtatctctgatctgggctcgtccaaagcatgatggaggcagtaaaattattggctatttcgtagaagcttgcaaacttcctggtgataaatgggtacggtgcaatactgcacctcaccagattccccaggaagagtacacagctactggcctagaagagaaagctcagtatcaatttagagctattgccaggaccgcggtaaacattagcccaccttctgaaccttctgatccagtgactatcctcgcagaaaatgtccctcccaggatagacctgagtgtggctatgaaatctttgcttactgtgaaagctggaactaatgtctgcttggatgctactgtttttggtaaaccgatgccaacagtttcttggaaaaaagatggcacactgctaaaaccagcagaaggcataaagatggccatgcagcggaatctgtgcaccttggagctattcagcgtgaaccggaaggactcaggagactataccattactgctgaaaattcaagtggttctaaatcagccaccattaagcttaaagtgttagataaaccgggtcctccagcatctgttaaaatcaacaaaatgtattcagatcgtgctatgctttcttgggaaccgcctcttgaagatggaggctcagaaatcaccaactatattgttgacaaacgtgaaacaagcaggcccaactgggctcaagtctctgcaactgtgcctatcaccagctgcagcgtggagaaacttatagagggccatgagtatcagttccgtatttgtgctgaaaataaatatggagtaggcgatccagtcttcactgaaccagcaattgccaaaaacccatatgacccaccaggacgctgtgatcctcctgttattagcaacataaccaaagatcacatgacagtcagctggaagccaccagcagatgatgggggctcacccatcactggctatttgcttgaaaagcgggaaacccaggctgttaactggactaaggtcaacagaaaacctattatagaaagaacattaaaagcaacaggtcttcaagaaggtaccgaatatgagttccgtgttacagctataaataaagctggaccaggcaaacccagtgacgcatccaaggccgcttatgctcgggaccctcagtatcctcctgcgccaccggctttccctaaagtatatgatacaactcgcagctctgtgagtctatcttggggcaagccagcctatgacggcggcagccctatcattggttatctcgttgaagtaaaacgggctgactccgataactgggtgaggtgcaacttaccacagaatctacagaaaacccgctttgaggttactggcctgatggaagacacacaatatcaattccgtgtgtatgccgttaataagattggatacagtgaccccagtgatgtgccagataaacactatcccaaggacatcttaattccacctgagggagaacttgatgcggacttaaggaagacactcatattacgtgctggagttactatgagactatatgtaccagtaaaaggacgcccacctccaaagattacttggtctaaaccaaatgtcaatctaagagacaggattggactggacataaagtcaactgactttgacactttcttgcgctgtgaaaatgtgaacaaatatgatgcaggaaaatatatcttaaccctggagaacagctgtggtaaaaaggaatataccattgttgtgaaagtgcttgatactcctgggccacctgtcaatgtgactgttaaggaaatatccaaagactctgcttatgttacctgggagcctcccattattgatggcggaagccccatcataaactatgtggtacaaaaacgtgatgcagagaggaaatcctggtctacagtgacaactgagtgctccaaaacaagcttcagagtagctaatttggaggagggaaaatcctacttcttccgagtgtttgctgaaaatgagtatggcattggtgatcccggtgaaactcgtgatgctgtcaaagcttcccaaactcctggaccagttgtggacctgaaagtgaggtctgtatctaagtcatcctgtagcattggctggaaaaagcctcacagtgatggtggaagtcggattattggatatgtagttgatttcctgactgaagaaaataagtggcaacgagttatgaaatccttaagcctacagtactctgcaaaagatttgactgaagggaaggaatataccttcagagtgagtgctgagaatgaaaatggagaaggaaccccaagcgaaatcactgttgtggcaagggatgatgttgtggctcctgatcttgacttaaagggtctacctgatttgtgctacttggctaaagaaaacagcaacttccggcttaagatccccataaaaggcaagccagctccatcagtctcctggaagaaaggggaagatcctctagcaactgacactagagtcagtgttgagtcatctgcggttaacacaactcttatagtgtacgattgccaaaaatctgatgctggaaaatacacaatcacacttaagaatgttgctggcaccaaggaaggaactatctccataaaggttgttggcaagcctggcatccccactggaccaatcaaatttgatgaagtcacagcagaagccatgaccttaaagtgggctcctccaaaggatgatggaggttctgaaatcaccaactatatcctagagaagagggattctgtgaacaacaagtgggtgacgtgcgcctcagctgtccagaaaaccacctttagagtaaccagacttcatgagggcatggaatataccttcagggtcagtgccgaaaataaatatggtgtaggggaaggcctgaaatcggagccaattgttgcgagacatccatttgatgtgcctgatgctcccccacctcccaatattgtggatgtcagacacgattcagtatctctaacttggactgaccccaagaaaactggtggttctccaattacagggtatcatctcgagttcaaggaaagaaacagccttttgtggaagagagctaacaagactccgataaggatgagagactttaaagtgacaggattaactgaaggtcttgaatatgaattccgagttatggcaatcaatttagcaggtgtgggcaagccaagcctaccatcagagcctgttgtggcactggacccaattgatcctcctggaaaacctgaggttattaacataacaaggaattcagtgactctcatttggactgaacctaaatatgacggtggtcataagttaactggatatatagtggagaagcgagatctaccttcgaagtcttggatgaaagccaaccatgttaatgtcccagaatgtgcctttactgtaactgaccttgttgagggtggaaaatatgaattcagaattagagcaaagaatacagcaggtgctatcagtgctccatcagaaagtacagaaaccattatttgcaaggatgaatacgaggcaccaacaattgtccttgatcccacaataaaagatgggctaacaattaaagcaggggataccattgttttgaatgccattagcattcttggcaaaccccttccaaaatcaagttggtccaaggcaggaaaagacattagaccatcagatatcactcagataacttcaaccccaacatcttccatgcttactatcaagtatgccactagaaaagatgcgggtgaatataccatcactgctaccaatccttttggcacgaaggtggaacatgtgaaggtaacagtccttgatgtacctggtcccccaggtcctgttgaaatcagtaatgtttctgctgaaaaagcaacacttacatggacacctcccttggaagatggcggctcaccaattaagtcctatatacttgaaaagagagaaaccagccgacttttgtggacagtggtttctgaagatattcagtcttgcaggcatgtggcaaccaaacttatccaaggaaatgagtacatcttccgggtctcagctgtaaaccactatggcaaaggagaacctgtacagtctgaacctgtcaaaatggtagacagatttggtccccctggccctcctgaaaaaccagaggtatcaaatgtcactaagaacactgccactgtcagctggaaaaggccagtggatgatggtggcagcgaaattacaggatatcatgtagaaaggagagaaaagaaaagcctgcgatgggtgagagcaataaaaacaccagtttccgatctcaggtgcaaagtaacaggactgcaagaaggaagcacctacgaattccgtgtcagtgcagaaaacagagcaggaattggtccacccagtgaggcttcagattctgttctgatgaaagatgcagcatatcctccaggaccaccttcaaatccgcatgtcactgatactaccaagaaatctgcttctttggcatggggcaagcctcattatgatggtggacttgaaatcactggctatgtcgtggagcatcaaaaagtaggagacgaggcctggataaaagataccacaggaaccgccctcagaatcactcagttcgttgttcctgatcttcagactaaagaaaaatacaacttcagaatcagtgccatcaacgatgcaggtgttggggagccagcggtgattccagatgttgaaatcgtagaacgggagatggctcctgattttgaactagatgccgagcttcgaagaacacttgttgttagagcaggactcagtattaggatatttgtgccaattaaaggtcgtcctgctcctgaagtgacatggaccaaagataacatcaacctgaaaaaccgagccaacattgaaaatacggaatcatttactcttctgattatcccagaatgtaacagatatgataccggtaaatttgtcatgaccattgaaaacccggctgggaagaaaagtggctttgtgaacgtcagagtcttggacacgccaggcccagtcctcaacctgcggcctacagacatcacaaaggacagtgtcaccctgcactgggacctccctctgatagatggaggctcacgtataacaaactacattgtagagaaacgtgaagcaacacggaaatcttattccacagccaccactaagtgccataaatgcacatataaagttaccggcttgtctgaagggtgtgaatatttcttcagagtgatggcagagaatgaatatggaattggtgagccaacagaaactacagagcccgtaaaagcctctgaagcaccatctccaccagacagccttaacatcatggacataactaagagcaccgtcagcctggcatggcctaagcccaaacacgatggtggcagcaagatcactggctatgtgattgaagcccaaagaaaaggctctgaccagtggacccacatcacaaccgtgaaagggttagaatgtgttgtgaggaatctaactgaaggagaggaatataccttccaagtgatggcagtgaacagcgcggggagaagtgcccctagagaaagcagacccgtcattgtcaaggagcagacaatgcttccagagctggatctccgtggcatctatcagaaactggtcattgccaaagctggtgacaacatcaaagttgaaattccagtgctcggtcgaccgaagcccacagtgacatggaaaaaaggagaccaaattcttaaacagacacagagagttaattttgaaaccacagcgacttcaaccattttaaatatcaatgagtgtgtcagaagtgatagtgggccctatccattaacagcaaggaacattgtaggagaggttggtgatgtcatcaccattcaagtccatgatatcccagggccacctactggaccaatcaaatttgatgaagtttcatctgattttgtaaccttctcttgggacccacctgagaacgatggtggtgtaccaataagcaactatgtagtggaaatgcggcagactgacagtactacctgggttgagttagcaaccaccgttatacgtactacctataaagccacccgccttactactggattagagtatcagttccgtgtaaaagctcagaatagatatggagttggaccaggcatcacatcagcatgcatagttgccaactatccatttaaggttcctggacctcctggtacccctcaggtaactgcagttaccaaggattcaatgacaattagctggcatgagccactttctgatggtggaagccccattttaggatatcatgttgaaagaaaagaacgaaatggtattctctggcagactgtgagcaaagctttagtaccaggcaacattttcaaatcaagtggacttacagatggtattgcttatgagttccgggtgattgcagaaaacatggcaggcaaaagtaagccaagcaagccatcagaacctatgttggctctggatcccattgacccacctggaaaaccagtacctctaaatattacaagacacacagtaacacttaaatgggctaagcctgaatatactgggggctttaaaattaccagttatatcgttgaaaagagagaccttcctaatggacggtggctgaaggccaacttcagcaacattttggagaatgaatttacagtcagtggcctaacagaagatgctgcatatgaattccgtgtgatcgccaaaaatgctgcaggtgccatcagtccaccatctgagccatctgatgctatcacttgcagggatgatgttgaggcaccaaagataaaggtggatgttaaatttaaggacacggttatattaaaagcaggtgaagcattcagactggaagctgatgtttcaggccgcccacctccaacaatggaatggagcaaagatggaaaagagctggaaggcacagcaaagttagaaataaaaattgcagatttctctactaatctggtaaacaaagattcaacaagaagggatagtggtgcctatacccttacagcgactaatcctggtggctttgctaaacacattttcaatgtcaaagttcttgacagaccaggcccacctgaaggacctttggctgtaactgaagtgacatcagaaaagtgtgtactatcatggttccctccactggatgatggaggtgccaaaattgatcattacatagtacagaaacgtgaaaccagcagattggcatggacaaatgtagcctcagaagtccaagtaacaaagctaaaggtcactaaactcttgaaaggcaatgaatacatattccgtgtcatggctgtaaataaatatggagtgggagagccactggaatcagagcctgtgcttgcagtgaatccttatggaccccctgatccgcccaaaaaccctgaagtgacaactattactaaagattcgatggttgtctgctggggacatcctgattctgatggtggaagtgaaatcatcaattatattgtggaacggcgtgataaagctggccaacgctggattaaatgcaacaaaaaaactcttactgatttaagatataaagtgtctggactgacagaaggacatgaatatgagttcaggattatggctgaaaatgctgctggaattagtgcaccaagtcctaccagtccattttacaaggcttgtgacactgtgtttaaacctggaccaccaggtaacccacgtgttctggatacaagcagatcatccatttcaatcgcttggaataaacctatctatgatggtggttcagaaatcactgggtatatggttgagattgccctgccagaggaagatgaatggcagattgtcactccaccagcaggactcaaggcaacttcgtatactatcactggcctcacagagaatcaggaatataagatccgcatctatgccatgaattccgaaggacttggggaacctgcccttgttcctggaactccaaaggctgaagacagaatgctgcctccagaaattgaactggatgctgacctgcgcaaagttgttactataagggcctgctgcaccctgagactttttgttcccatcaaaggaaggcctgcacctgaggtgaagtgggcccgggaccatggagaatctttagataaagctagcatcgaatccacaagctcttacaccctgcttattgttggaaatgtaaacagatttgacagtggcaaatatatactaactgtagaaaatagttcaggcagcaagtctgcatttgtcaatgttagagttctcgatacaccaggccccccacaggatctgaaggtaaaagaggtcactaagacatctgtcacactcacatgggacccacctctccttgatggaggttcaaaaatcaagaactatattgttgaaaagcgggaatcaacaagaaaagcatattcaactgttgcaacaaactgccacaagacttcctggaaggtagaccagcttcaagaaggctgtagctactatttcagggttctcgcagaaaatgaatatggcattgggctgcctgctgaaaccgcagaatctgtgaaagcatcagaacgacctcttcctccaggaaaaataactttgatggatgtcacaagaaatagtgtgtcactctcttgggagaaaccagagcatgatggaggcagccgaattctaggctacattgtggagatgcagaccaaaggcagtgacaaatgggccacgtgtgccacagtcaaggtcactgaagccactatcactggattaattcagggtgaagaatactctttccgtgtttcagctcagaatgaaaagggcatcagtgatcctagacaactgagtgtgccagtgatcgccaaagatcttgtcattccaccagccttcaaactcctgttcaatactttcactgtactggcaggtgaagacctaaaagttgatgttccattcattggccgccctaccccagctgtaacctggcataaagataatgtaccactgaagcagacaactagagtaaatgcagagagcacagaaaataattcactactgacaataaaggacgcctgccgagaagatgttggccattatgtggttaaactgactaactcagctggtgaagctattgaaacccttaatgttatcgttcttgacaaaccagggcctccaactggaccagttaaaatggatgaagtgacagctgatagtattactctttcctggggcccacccaagtatgatggtggaagttctatcaataattacattgttgagaaacgggacacttccacaaccacctggcaaattgtatcagctacagttgcaaggacaacaataaaggcttgcagactgaagactggatgtgaatatcagtttagaattgcagctgaaaacagatatgggaagagtacctacctcaattcagagcctactgtagcccaatatccattcaaagttcctggtcctcctggcactccagttgtcacactgtcctccagggacagcatggaagtacaatggaatgagccaatcagtgatggaggaagtagagtcattggctatcatctagaacgcaaggaaagaaatagcatcctctgggttaagttgaataaaacacctattcctcaaaccaagtttaagacaactggccttgaagaaggtgttgaatatgaatttagagtctctgcagagaacatcgtgggcattggcaagccgagtaaagtatcagaatgttatgtggctcgtgacccatgtgatccaccaggacggccagaggcaatcattgtcacaaggaattctgtgactcttcagtggaagaaacccacctatgacggtggaagcaagatcactggttatattgttgagaagaaagaattacctgagggccgttggatgaaagccagttttacaaatattattgacactcattttgaagtaactggcctagttgaagatcacagatatgagttccgggttatagcccgaaatgccgcaggagtgtttagtgagccttcagaaagcacaggagcaataacagctagagatgaggtagatccaccacgaataagtatggatccaaaatacaaagacacaatcgtggttcatgctggtgaatcattcaaggttgatgcagatatttatggcaaaccaataccaaccattcagtggataaaaggtgatcaggagctttcaaacacagctcgattagaaataaagagcaccgactttgccaccagtctcagtgtaaaagatgcagtacgtgtcgacagtggaaattacatactgaaggccaaaaatgttgcaggagaaagatcagttactgtgaatgtcaaggttcttgacagaccagggccacctgaaggacctgttgttatctcaggagttacagcagaaaaatgcacactagcttggaaacccccacttcaggatggtgggagtgacatcataaattatattgtggaaaggagagaaaccagccgcttagtttggactgtggttgatgccaatgtgcagactctcagctgcaaggttactaagcttcttgaaggcaatgaatatactttccgtataatggcagtaaacaaatatggtgttggtgaacctcttgaatctgagccagtagttgccaagaatccatttgtagtaccagatgcaccaaaagctccagaagtcacaacagtgaccaaggactcaatgattgttgtatgggaaagaccagcatctgatggtggtagtgaaattcttggatatgttcttgagaaacgggataaagaaggcattagatggacaagatgccataagcgtctgattggagagttgcgcctgagagtaactggactcatagaaaatcacgattatgagttcagagtttctgctgagaatgctgctggacttagtgaaccaagccctccttctgcttaccaaaaggcttgtgatcctatttataaaccaggacccccaaacaaccccaaagtcatagacataaccagatcttcagtattcctttcttggagcaaaccaatatatgatggtggctgtgaaattcaaggatacattgttgaaaaatgtgatgtgagtgttggtgaatggacaatgtgcactccaccaacaggaattaataaaacaaacatagaagtagagaagctgttggaaaagcatgaatacaacttccgtatctgtgctattaataaagctggagttggagaacatgctgacgtccctggacctattatagttgaagaaaaattagaagcaccagacattgatcttgacctagaactaaggaaaatcataaatataagggcaggtggctccttaaggttatttgttcctataaaaggtcgtcctacaccagaagttaaatggggaaaggtggatggtgaaatccgagatgcagctataattgatgtcactagcagtttcacctctcttgttcttgacaatgtcaaccgatatgatagtggaaaatatacgcttacattagaaaacagcagtggaacaaagtctgcctttgttactgtgagagttctggacacgccaagtccacctgttaacctgaaagtcacagaaatcaccaaagactcagtatcaattacatgggaacctcctttgttggatgggggatccaaaataaaaaattacattgttgagaaacgtgaagccacaagaaaatcatatgctgctgttgtaactaactgccataagaattcttggaaaatcgatcagctccaagaaggttgcagttattactttagagtcacagctgagaatgagtatggtattggccttcctgcccagactgctgatccaattaaggttgcagaagtgccacaacctcctggaaaaataactgtggatgatgtcaccagaaacagtgtctctctgagttggacaaaacctgaacatgatggtggcagtaaaatcattcagtatattgtggaaatgcaagctaaacacagtgagaaatggtcagagtgtgctcgagtaaagtctcttcaggcagtaattaccaacctaactcaaggggaagaatatctttttagagttgttgctgtaaatgaaaaggggagaagtgatcctcggtcccttgcagttccaatagttgccaaagatctggtaattgagccagatgtaaaacctgcattcagtagttacagtgtacaggttggccaagatttgaaaatagaagtgccaatttctggacgtcctaagccaaccattacctggactaaagatggtctcccactgaagcagaccacaagaatcaatgttaccgattcactggatctcaccacactcagtattaaagaaactcataaggatgatggtggacaatatggaatcacagttgccaatgttgttggtcagaagacagcatccatcgaaattgtaactctagataaacctgatcctccaaaaggacctgttaaatttgatgacgtcagtgctgaaagtattacattatcttggaaccctccattatatacagggggctgccaaatcaccaactacattgttcagaaaagagatacaaccaccacagtatgggatgttgtttctgctactgttgctagaactacactcaaagtgaccaaactgaaaactggtacagaataccaatttagaatatttgccgaaaacagatatggacaaagctttgccttagagtctgatccaattgtagctcaatatccctacaaagaaccaggccctccaggtacaccatttgccacagccatttccaaagactccatggtcatacagtggcatgaaccagtcaacaatggtggaagccccgtcataggttaccacctggagagaaaagaaagaaacagtattttgtggacaaaggtcaacaaaactattattcatgacacccaattcaaagcacagaatcttgaagaaggcattgaatatgaattcagagtgtatgctgaaaatattgttggtgtaggcaaagcaagcaagaattctgaatgctatgtagccagagatccctgtgacccaccaggaaccccagaaccaataatggttaaaagaaatgaaatcactttacagtggaccaaacctgtgtatgatggtggaagtatgattacaggctacattgtagagaaacgtgatttgcctgatggtcgttggatgaaagctagctttacaaatgtcattgaaactcaatttactgtgtcaggtcttactgaagatcaaagatatgaattcagagtcattgcaaagaatgcagctggtgcaataagtaaaccctctgacagtactggaccaataactgccaaggatgaggttgaactcccaagaatttcaatggatccaaaattcagagacacaattgtggtaaatgctggagaaacattcagacttgaggctgatgtccatggaaagcccctacctaccattgagtggttaagaggagataaggaaattgaagaatctgctagatgtgaaataaagaacacagatttcaaggctttacttattgtaaaagatgcaattagaattgatggtgggcagtatattttaagagcttccaatgttgcaggttctaagtcattcccagtaaatgtaaaagtattagatagaccaggacctccagaagggccagtccaggttactggagtcacttctgaaaaatgctctttaacatggtctccaccacttcaagatggtggcagtgacatttctcactatgttgttgaaaagcgagaaaccagtcgacttgcctggactgttgttgcttcagaagttgtgaccaattctctgaaagttaccaaactcttagaaggtaatgaatatgttttccgtataatggctgtcaacaaatatggtgttggagagcctttggaatctgcaccagtactaatgaaaaatccatttgtgcttcctggaccaccaaaaagcttggaagtcacaaatattgccaaagactccatgaccgtctgttggaaccgtccagatagtgatggtggaagtgagattattggttacattgtagagaaaagagacagaagtggcattcgatggataaaatgtaataaacgccgcattacagatttgcgtctaagagtgacaggattaacagaagatcatgagtatgaattcagggtctctgcagaaaatgctgctggagttggggaaccaagtccagctacagtttattataaagcctgtgatcctgtgttcaaacctggcccacctaccaatgcacacattgtagacaccactaaaaattcaatcacacttgcctggggtaaacccatctatgatggcggcagtgagatcttgggatatgtagtagaaatctgtaaagcagatgaagaagaatggcaaatagttactccacagactggcctgagagtcactcgatttgaaatttcaaaactcactgaacaccaagagtataaaatacgagtctgtgccctcaacaaagttggtttaggtgaggctacatcagttcctggtactgtgaaaccagaagataaacttgaagcacctgaacttgaccttgactccgaattaagaaaaggaattgttgtaagagctggtggatctgccagaattcacattccattcaaaggtcgtccaacgcctgagatcacttggtctcgagaggaaggtgaattcacagataaggtccaaattgaaaagggagtaaactatacccaactatcaatagataactgtgatagaaatgatgctggaaaatacattcttaagttggaaaacagcagtggatcaaagtctgcttttgtaactgtgaaagttcttgacactccaggaccaccacagaatttggcagtcaaagaagtgagaaaagattctgccttcctggtatgggagccacccatcattgatggaggggcaaaggtcaagaactatgtgattgacaaacgtgagtcaaccagaaaagcgtatgctaatgtgagtagtaaatgcagcaaaacaagttttaaagtggaaaaccttacagaaggagccatttattacttcagagtcatggctgaaaatgaatttggagttggtgttccagtggaaactgttgatgccgtgaaagctgctgaacctccttccccaccaggaaaggttacactcactgatgtgtcccagaccagtgcatcacttatgtgggagaaacctgaacatgatggcggtagcagagtcctggggtacgttgttgaaatgcagcccaaaggaactgaaaaatggagcattgtggctgaatccaaagtctgtaatgcagttgttactggtttgagttctggacaagaatatcagttccgtgtcaaggcttataatgagaaaggaaaaagcgatccaagagtgttgggtgttcctgtcatagccaaggacttgactatacagcctagtttaaagttaccatttaacacatatagtatccaagctggagaagatcttaaaatagaaattccagttataggccgaccaagacctaacatttcttgggtcaaagatggtgagcctcttaaacagacaacaagagtaaacgttgaagaaacagctacctcaactgttttgcacattaaagaaggtaacaaagatgactttggaaaatacaccgtaacggcaacaaatagtgcaggcacagcaacagaaaatctcagtgttatcgttttagaaaagcctggacctccagttggcccagttcggtttgatgaagttagtgcagactttgtagtcatatcttgggaacctccagcctatactggtggctgccaaataagcaactacattgtagagaagcgagatacaaccaccaccacttggcacatggtatcagcaacagttgcaagaacaacaattaaaataaccaaactgaaaacaggcacggagtaccagtttagaatttttgctgaaaacaggtatggaaaaagtgccccactggattctaaggcagttattgtacaatatccatttaaagaacctggaccacctggaactccttttgtgacatcaatctcaaaagatcagatgcttgtgcaatggcatgagccagtgaatgatggaggcaccaaaattattggctaccatcttgaacagaaagaaaagaacagtattttatgggtcaagttaaataagacccccattcaggacaccaaattcaaaacaactgggcttgatgagggccttgagtatgagttcaaagtttctgctgaaaatattgttggcattggcaagcctagcaaagtgtcagaatgctttgttgctcgtgatccatgtgacccacctggtcgccctgaagccattgttattacaagaaacaatgtcacactgaaatggaagaaacctgcctatgatggtggtagcaaaataacaggttatattgtagaaaagaaagatctacctgatggccgctggatgaaagccagctttaccaacgtattagaaactgaatttacagtgagtggacttgtagaagaccaaagatatgaatttagagtaattgcaagaaatgcagctggaaactttagtgaaccatctgatagtagtggtgccattactgcaagagatgaaattgatgcaccaaatgcctctctggatccaaaatataaagatgtcatcgttgttcatgcaggagagacttttgttcttgaagccgacatccgtggcaaacctatacctgatgttgtttggtcaaaagatggaaaagaacttgaagaaacagctgctagaatggaaattaaatctactattcagaaaacaactcttgttgtcaaagactgtatacggactgatggaggacaatatattctgaaactcagcaatgttggtggtacaaagtctatacccatcactgtaaaggtacttgacaggccagggcctcctgaagggcctctgaaagttactggagttactgcggaaaaatgttacctggcatggaacccacctttgcaagatggtggtgctaatatttcacattacatcattgaaaagagggagacaagccgactctcttggacccaggtttcaactgaggtacaggcccttaactacaaagttactaaacttcttcctggtaatgagtacattttccgtgtcatggctgtgaataaatatggaattggagagcccttggaatctgggcctgttacggcctgtaatccttataagccaccaggtcctccctcaacacctgaagtctcagcaatcaccaaagattctatggtagtaacatgggcacgcccagtagacgacggaggtaccgaaattgagggctacattcttgaaaaacgagataaggaaggcgttagatggaccaagtgcaacaagaaaacattaacggatctgcggctcagggtaactggtcttaccgaaggccattcctatgaattcagagttgctgctgaaaatgcagctggtgtgggagaacctagtgagccatctgttttctaccgtgcgtgtgatgccttgtatccaccaggtcccccaagcaatccaaaagtgacggacacttccagatcttctgtctccctggcatggagtaagccaatttatgatggtggcgcacctgttaaaggctatgttgtagaggtcaaagaagctgctgcggatgaatggacaacctgcactccaccaacaggattacaaggaaagcagttcacagtgaccaagcttaaagaaaacactgaatataacttccgtatttgtgccatcaattctgaaggtgtaggtgaacctgcaactctacctggctcagtggttgctcaggagaggatagagccaccagaaatagaactcgatgctgatctcagaaaggtggtcgttctgcgtgcaagtgctactttacgcttatttgtcactatcaaaggtcgaccagaacccgaagttaaatgggaaaaggcagaaggcattctcactgacagggctcagatagaggtgaccagctcatttacaatgttggtgattgataatgttaccagatttgacagtggtcggtataatctgacattagaaaataatagtggctccaaaacagcttttgttaacgtcagagttcttgactcaccaagtgcccctgtgaatttgaccataagagaagtgaagaaagactcagtgacgttgtcctgggaaccaccacttattgatggtggagctaagattacaaactacattgtcgaaaaacgagaaactacaagaaaagcctatgctaccattacaaataattgcactaaaactactttcagaattgaaaatctacaagaaggatgttcttactacttccgagtcttggcttccaatgaatatgggattggtttgccagctgaaacaacagaacccgttaaagtgtctgaaccacccctcccacctggaagagtaactcttgttgatgtgacccgtaatacagctacaattaagtgggagaaaccagaaagtgatggtggcagcaaaattactggttatgtggttgaaatgcagactaaagggagtgaaaagtggagcacctgcacacaagttaagactctagaagcaactatatctggcttaactgcaggagaagagtatgtcttcagggtagctgcagttaacgaaaagggaagaagtgatccaagacaacttggagtgccagtaattgcaagggatattgaaataaagccttcagttgagcttcctttccatactttcaatgtaaaggctagagaacaacttaagattgatgtgccattcaaaggaagacctcaagctactgtgaactggagaaaagatggtcagactcttaaagagacaactagagtcaatgtttcttcttcaaagactgtaacatcactatctattaaggaagcttcaaaggaagatgttggaacttatgaattatgtgtttcaaacagtgctggatccataacagttcctattactataattgtccttgacagaccaggacctccaggtcctatacgtattgatgaggttagttgtgacagcataaccatttcttggaatcctccagaatatgatggtggctgccaaattagcaattacattgttgaaaagaaagaaaccacctctacaacatggcacatagtttcacaagcagttgcaagaacatccattaaaatagttcgcctgacaacaggaagtgagtatcagttccgtgtttgtgcagaaaaccgctatggaaagagctcctacagtgaatcttcagctgttgttgcagagtatccattcagtcccccaggtcctcctggtactcctaaagttgtgcatgccacaaaatctaccatgcttgtaacctggcaagtgccagttaatgatggaggaagtcgagtaattggctatcatcttgagtataaagaaagaagcagcattctttggtcaaaagcaaataaaatcctcattgctgatactcaaatgaaagtctccggccttgatgaaggactgatgtatgagtatcgtgtatatgctgaaaatattgctggaattggtaaatgcagtaaatcttgtgaaccagtccctgcaagagatccttgtgaccctcctggacaacctgaagtcacaaatatcacaagaaaatcagtgtcacttaaatggtctaaaccacattatgatggtggagctaagatcacaggatacattgttgaacgcagagaactaccagatggccggtggctgaagtgcaattatactaatatacaagaaacatactttgaagtaactgaacttactgaagatcagcgttatgaattccgggtttttgcaaggaatgctgctgactcagttagtgagccatctgaatccactgggcctattatagttaaagatgatgttgagcctccaagagttatgatggatgtcaagttccgagacgttattgttgtcaaagctggagaggtccttaagataaatgcagacattgcagggcgacctctgccagtaatttcctgggccaaggatggtatagaaattgaagaaagagcaagaacagaaatcatctcaacagacaatcatactttgttaacagttaaagactgtataagacgagacactgggcaatatgtactaacactgaagaatgttgccggcactcggtctgtggccgttaattgcaaagtacttgataagcctggtccaccagcaggaccacttgaaataaatggcctcactgctgagaaatgctctctttcctggggacgtccccaagaagatggtggtgcagatatcgactattacatcgtagaaaaacgtgaaacaagccaccttgcatggacaatatgtgaaggagagttacagatgacatcctgtaaagtaaccaagttactcaaaggcaatgaatatatatttagagtaactggtgttaataaatatggtgttggtgagcccctagagagtgtagctataaaggcactagatccatttacagttccaagtccacccacgtctttggaaattacttctgtgaccaaagaatctatgacactttgctggtcaagacccgagagtgatggaggtagtgaaatatctggatatataattgaaaggcgagagaaaaatagcctaagatgggtgcgtgtaaacaaaaaaccagtttatgatctaagagtgaaatcaacaggacttcgggaaggatgtgaatatgaatatcgtgtttatgcagaaaatgctgctggcctaagtcttccaagtgaaacctctcccttaattagggcagaagatccagtgttcctaccatctcctccatccaaacccaaaattgtggactcaggcaagacaactataactattgcctgggttaagccgctgtttgatggtggggccccgataactggatatactgtagaatacaaaaaatctgatgacactgactggaaaacttccattcagagcttacgagggacagaatatacaataagcggactaacaacaggagctgaatatgttttcagagtaaaatctgtcaataaggttggtgctagtgaccccagtgatagctctgaccctcagatagcaaaggaaagagaagaagaacctttatttgatattgacagtgaaatgaggaagaccttgattgtcaaggctggtgcctcatttaccatgactgtgcctttccgaggaagaccagtacccaatgtcttgtggagtaagccagacactgacctccgtactagagcttatgttgataccacagactcccgtacatcactgaccattgaaaatgccaacagaaatgactctggaaagtacacattaacaattcagaatgttttgagtgctgcttcactgaccttagttgtcaaagttttagataccccaggtcctccaaccaacattactgtgcaagatgtaaccaaagagtctgcagtgttatcctgggatgttcctgaaaacgatggtggagcaccagtgaagaattaccacatagaaaaacgtgaggccagcaagaaagcatgggtctctgtgaccaacaactgtaaccgcctctcctacaaagttaccaatttacaagaaggagctatctattacttcagagtctctggagaaaatgagtttggtgttggtataccagctgaaacaaaggaaggagtaaaaataacagaaaaaccaagcccacctgaaaaacttggagtaacaagtatatccaaagacagtgtttccctgacctggctgaagcctgaacatgatggcggaagcagaattgtacactatgtcgttgaagcactagaaaaaggacagaaaaactgggttaaatgtgcagtggcaaagtcaacccatcacgttgtttccggtctgagagagaattctgaatactttttccgagtgtttgctgaaaatcaagctggcctgagtgacccgagagagcttctgcttcctgttcttattaaggagcaactagaaccacctgaaattgatatgaagaatttcccaagtcacactgtatatgttagagctggttcaaaccttaaagttgacattccaatctctggaaaaccacttcccaaagtgaccttatcaagagatggtgtcccccttaaggcaaccatgagatttaataccgaaattactgctgagaacctgaccatcaatctcaaagaaagtgttacagctgacgctgggagatatgaaatcactgctgccaactccagtggtacaaccaaagctttcattaacattgttgtgctagacaggcctggtcctccaactggccctgttgttattagtgatataactgaagaaagtgtgactctcaaatgggagccacctaagtatgacggtggaagtcaagttaccaactacattctactcaaaagagaaacaagtactgcagtgtggactgaagtgtctgcaacagttgcaagaaccatgatgaaagtcatgaaactgaccacaggagaagaataccaattccgcatcaaggcagaaaaccgctttggcatcagtgatcatatagattcagcttgtgtgactgtcaaactaccatacacaacacctggaccaccatctacaccatgggtcactaatgttactcgagaaagcatcactgtgggctggcatgaaccagtgtcaaatggaggcagtgcagtcgtaggctatcacctggaaatgaaagacagaaacagtattttatggcaaaaagccaacaaactggtcatccgcacaactcacttcaaagtcacaacaatcagtgctggacttatttatgaattcagggtgtatgcagaaaatgctgctggagttggaaaacctagccatccttctgaaccagtcttggcaattgatgcttgtgaacccccaagaaatgttcgtatcactgatatttcaaagaactctgtcagcctttcatggcaacaaccagctttcgatggaggtagcaagattacaggctacattgttgagagacgtgaccttccagatggcagatggaccaaggccagcttcaccaatgttactgaaactcaattcatcatctctggcttgactcagaattcccagtatgaattccgtgtctttgctaggaatgctgttggttccattagcaatccatctgaggttgtagggcccattacttgcatcgattcttatggtggtcctgtaattgatttgcctctagaatatacagaagttgtcaaatacagagcaggtacatctgtgaagctcagagctggcatttctggcaaacctgcgcctactattgagtggtataaagatgataaagaattacaaaccaatgcactggtgtgtgttgaaaataccacggacctcgcatctatactcatcaaagatgccgatcgccttaatagtggatgctatgaattaaaactaaggaatgccatgggctcagcctcagccaccatcagagtacagatccttgacaaaccaggcccacctggtggaccaattgaatttaagactgtaactgctgagaagatcacccttctctggcggcctccagctgatgatggtggtgcaaaaatcactcactacattgtggaaaagcgtgagacaagccgcgttgtgtggtctatggtgtctgaacatttggaagagtgcatcattacaaccaccaaaattatcaaaggaaatgaatacatcttccgggtccgagccgtgaacaaatatggaattggcgagccactggaatctgattccgttgtagccaagaacgcatttgttacacctgggccaccaggcataccagaagtgacaaagattaccaagaattcgatgactgttgtatggagcaggccaattgcagatggcggtagtgatataagtggctatttccttgaaaaacgagacaagaagagcctaggatggtttaaagtactaaaagagactatccgtgacaccagacaaaaagtaacaggactcacagaaaacagtgactatcaatacagagtttgtgctgtaaacgctgctggacagggtccattttctgaaccatctgaattctacaaagctgctgatcctattgatcctccaggtccacctgctaagataagaatcgcagattcaaccaagtcatccatcacccttggctggagtaagcctgtctatgatgggggcagtgctgttactgggtatgttgtcgagataagacaaggagaggaagaggaatggactactgtctctaccaaaggagaggtcagaactacagaatatgtggtatccaacctgaaacctggagtcaattactacttccgggtatctgctgtaaactgtgctggacaaggagaacctatagaaatgaatgaacctgtacaagctaaagatatacttgaggcaccagagattgacctggatgtggctctcagaacttctgttattgccaaagctggtgaagatgtacaagtgttgattccctttaaaggcagacctccacctactgtcacatggagaaaagatgagaagaatcttggcagtgatgccagatacagcattgaaaacactgattcatcctcattactcaccattcctcaagttactcgcaatgatacaggaaaatatattctcacaatagaaaatggagttggtgaacctaagtcttcaactgtgagtgttaaagtgcttgacacaccagctgcctgccagaaactacaggttaaacatgtttctcgaggcacagtcactttgctctgggatcctcctctcattgatggaggatctccaataattaattatgtcattgaaaagagagatgccaccaagagaacatggtctgtcgtgtcacacaaatgttctagcacatccttcaagctaatagatttgtcggagaagactccattcttcttcagagttcttgcagaaaatgaaattggaattggggaaccctgtgaaactacagagccagtgaaggctgctgaagtaccagctcctatacgtgatctctcaatgaaagactcaacaaagacatctgtcatcctcagctggaccaaacctgactttgatggtggtagcgtcatcacagaatatgttgtagaaaggaaaggtaaaggtgaacagacgtggtcccacgctggcataagtaagacatgtgaaattgaggttagccaacttaaggagcagtcagtcctggagttcagagtgtttgccaaaaatgagaaaggactgagtgatcctgtcactattgggccaattacagtgaaagaacttattattacacctgaagttgacctgtcagatatccctggggcacaagtcactgtgagaattgggcacaatgtgcaccttgaattaccttataagggaaaacccaaaccatccatcagttggctgaaagatggcttgccactgaaagaaagtgaatttgttcgcttcagtaaaactgaaaacaaaattactttgagtattaagaatgccaagaaggagcatggaggaaaatacactgttattcttgataatgcagtgtgtagaattgcagtccccattacagtcatcacccttggcccaccatcaaagcccaaaggacccattcgatttgatgaaatcaaggctgatagtgtcatcctgtcatgggatgtacctgaagataatggaggaggagaaattacttgttacagcatcgagaagcgggaaacttcacaaactaactggaggatggtgtgttcaagtgttgccagaacgactttcaaagttcctaatctagtcaaagatgctgagtaccagtttagagtgagagcagaaaacagatacggagtcagccaaccacttgtctcaagcattattgtggcaaaacaccagttcaggattcctggtcccccaggaaagccagttatatacaatgtgacttctgatggcatgtcactaacttgggatgctccagtttatgatggtggttcagaagttactggattccatgttgaaaagaaagaaagaaatagcatcctctggcaaaaagttaatacatcaccaatctctggaagagaatatagagccactggactggtagaaggtctggattaccaattccgtgtatatgctgaaaattctgctggcctaagctcacctagtgacccaagcaaatttaccttagctgtttctccagtagacccacctggcactcctgactacattgatgtcacccgggaaaccatcacacttaaatggaacccaccattgcgtgatggaggcagtaagattgtgggctatagcattgagaaacggcaaggaaatgaacgctgggtgagatgcaactttactgacgtcagtgaatgtcagtacacagttacaggactcagtcctggggatcgctatgagttcagaataattgcaagaaatgctgttggaactataagcccgccctcacagtcttctggcattattatgacaagagatgaaaatgttccaccaatagtagagtttggccctgaatactttgatggtctcattattaagtccggagagagccttagaattaaagctttggtacaaggaagaccagtgcctcgagtaacttggttcaaagatggagtggaaatcgaaaagaggatgaatatggaaataaccgacgtacttggatccaccagcctatttgttagagatgctactcgggaccatcgtggtgtatacacagtggaagccaaaaatgcatctggttctgcaaaagcagaaattaaagtgaaagtacaagatacaccaggaaaagtagttgggccaataagattcaccaatattactggggagaagatgactctgtggtgggatgccccactcaatgacggttgtgctcccataacccactacatcattgaaaaacgggaaaccagcagacttgcctgggcactaattgaggataaatgtgaagcccaaagttacactgccattaaactaataaacggcaatgaataccaattccgtgtttctgcagttaacaagtttggtgttggcaggccacttgattctgatccagtggttgctcaaatacaatatactgttcctgatgcccctggcattccagaacctagcaacataacaggcaacagcattaccctgacatgggcaaggccagaatcagatggtggcagtgaaattcaacagtatatccttgaaagaagagaaaagaaaagcacaagatgggtaaaagtgatcagcaaacgaccaatctctgaaacaagattcaaagtcactggtctgacagaaggcaatgagtatgaattccatgtcatggctgaaaatgctgcaggagttggacctgcaagtggcatctcaagactcattaaatgtagagagcccgtcaacccaccaggtcctcccacagtggtcaaagtaacagacacatcaaagacaactgtgagcttagaatggtccaaaccagtgtttgatggtggcatggaaataattgggtatattattgaaatgtgtaaggccgacttaggagactggcacaaggtgaatgcagaggcatgtgtgaaaacaagatatacagtcactgatctacaagcaggtgaagaatacaaattccgagttagtgctatcaatggtgctggaaaaggcgacagctgtgaagtgactggcacaattaaagcagttgaccggttaacagctcctgagttagacatagatgcaaacttcaaacagactcatgttgttagagctggggccagtattcgcctcttcattgcctaccaaggtagacctactcctacagctgtgtggagcaaaccagactctaaccttagccttcgggctgatatccatacaacagattccttcagcaccctcactgtggaaaactgcaacagaaatgatgcagggaaatatacccttactgtggaaaacaacagtggtagtaagtcaatcacattcaccgtgaaagtgctagacactccaggcccacctggcccaattaccttcaaagatgtgacccggggatctgctacattgatgtgggatgcccctcttcttgacggtggtgcccgaatccatcattatgtggtagagaaacgagaggcaagtcgccgtagttggcaggttatcagtgaaaaatgcactcgtcagatcttcaaggtcaatgacctggccgaaggtgttccgtactatttccgtgtttctgcagtaaatgagtatggtgttggtgagccctatgaaatgccagaaccaattgtagccacagaacagcctgctccacctaggagacttgatgttgttgatactagcaaatcctccgcagtcttagcttggcttaaacctgaccacgatggaggcagccggatcactggctacctgcttgaaatgagacaaaagggatctgacttctgggttgaagctggtcacaccaaacagctaactttcacagtagagcgtcttgttgagaaaactgaatatgaattccgtgtgaaggccaagaatgatgctggctatagtgaacccagagaagccttctcttctgtcatcattaaggagcctcaaatcgagcccactgctgacctcactggaattaccaatcagcttataacttgcaaagcaggaagcccatttaccattgacgtaccaatcagtggtcgtcctgcccccaaagtaacatggaaactggaagaaatgagacttaaagagacagatcgagtgagcattacaacaacaaaagacagaaccacactgactgtaaaggacagcatgagaggtgactctggaagatacttcttgaccctggaaaatacagctggtgttaaaacatttagcgtcacagttgtggtcattggaaggccaggtccagtaaccggccccattgaggtctcatctgtctcagctgaatcgtgtgtcctgtcatggggagaacctaaagatggaggaggcactgaaattactaattacatagttgaaaagcgtgaatcgggtacaacagcttggcagcttgtcaattccagtgtcaagcgcactcaaattaaagtcactcatctcacaaaatacatggaatattctttccgtgtcagttcagagaacagatttggtgtcagcaaacctctagaatcagcaccaataattgctgaacatccatttgtcccaccaagcgctcctaccagacctgaggtctaccatgtgtctgccaatgccatgtctattcgttgggaagaaccctaccacgatggtggcagtaaaatcattggctactgggttgagaagaaagaacgtaatacaattctttgggtgaaagaaaacaaagtgccatgcttagagtgcaactacaaagtaactggtttagtagaaggactggaatatcagttcagaacttatgcactcaatgctgcaggtgttagcaaggccagcgaagcttcaagacctataatggctcaaaatccagttgatgcaccaggcagaccagaggtgacagatgtcacaagatcaacagtatcactgatttggtctgccccagcgtatgatggaggcagcaaggttgtgggctacatcatagagcgtaagccagtcagtgaggtaggagatggtcgctggctgaagtgcaactacaccattgtatctgacaatttcttcaccgtgactgctctcagtgaaggagacacttatgagttccgtgtgttagccaagaatgcagcaggcgtaattagcaaagggtctgaatctacaggccctgtcacttgccgagatgaatacgctccacccaaagccgaactggatgcccgattacacggtgatctggttaccatcagagcaggttctgatcttgttctggatgctgcagttggtggcaaacctgaacccaaaattatctggaccaaaggagacaaggagctagatctctgtgaaaaagtctctttgcagtatactggcaaacgagcaactgctgtgatcaagttctgtgacagaagtgacagtggaaaatacactttaacagtgaaaaatgccagcgggaccaaggccgtgtctgtcatggtcaaagtgcttgattcccctggcccatgtggaaagctcaccgtcagcagagtaacacaggagaagtgcactttagcctggagccttccgcaggaagacggaggagcagaaatcactcactacatcgtggaaagacgcgagactagcaggctcaactgggtgattgttgaaggcgaatgcccaaccctatcctatgtcgttaccaggctcatcaagaacaatgagtacatattccgagtgagggcagtaaacaaatatggccctggtgtgcctgttgaatcagagccaattgtagccagaaactcattcactattccatcaccacccggcatacctgaagaagttgggactggcaaagagcatatcatcattcagtggacaaaacctgaatctgatggtggcaatgaaatcagcaactacctagtagacaaacgtgagaagaagagcctgcgctggacacgtgtcaacaaagactatgtggtgtatgataccaggctgaaggtgaccagcctgatggagggttgtgattaccagttccgggtgaccgcagtgaatgcagctggtaacagtgagcccagcgaagcttccaacttcatctcatgcagagaaccatcatatacccctggaccaccttctgctccaagagttgtggataccaccaaacacagcattagtttggcatggaccaaacccatgtacgatggtggtactgacattgtaggatatgttctggaaatgcaagagaaggacactgatcagtggtaccgagtgcataccaatgccacaataagaaatactgaattcactgtgccagaccttaaaatgggccagaaatattccttcagagttgctgccgtgaacgtgaagggtatgagcgaatacagcgaatcaattgctgaaattgagcccgtggaaagaatagaaataccagatcttgagcttgcagatgatctaaagaagactgtgaccatcagggctggggcctccttgcgcttgatggtgtctgtatctggaagaccacctcctgtcataacgtggagcaagcagggcattgaccttgcaagccgggcaattattgacaccactgagagctactcattgctaatagtggacaaagttaatcggtacgatgctggaaaatacacaattgaagctgaaaaccaatctggcaagaaatcagcaacagtccttgttaaagtctatgatactcctggtccctgtccttcagtgaaagttaaggaagtatcaagagattctgtgactataacttgggaaattcccacgattgatggtggagctccagtcaacaattacatcgttgagaagcgtgaagctgctatgagagcattcaaaacagtaactaccaaatgcagcaagacactttacagaatttctggacttgtagaaggaaccatgtactatttcagagtgctgccagaaaatatttatggcattggagaaccttgtgaaacatctgatgcagtactggtctcagaagtgcctttggtgcctgcaaagctagaagtggtcgatgtcaccaaatccactgttacccttgcctgggaaaaaccactctacgatggtggtagccgactcactggatatgttctcgaggcctgcaaagctggcacagagagatggatgaaggttgtcaccttaaaacccacagtcctagagcacactgttacttccttaaatgaaggtgaacaatacttatttagaataagggcacaaaatgagaaaggtgtgtcagaaccaagagagactgtcacagccgtgactgtacaagacctcagagtgttgccaacaatcgatctttctacaatgcctcagaagaccatccatgtcccagctggcagaccagtagagctggtgatacctattgctggccgtccacctcctgctgcttcctggttctttgctggttctaaactgagagaatcagagcgtgtcacagttgaaactcacactaaagtagctaaattaaccatccgtgaaaccactatcagagatactggagaatacacacttgaattgaagaatgttaccggaactacttcagaaaccattaaagttatcattcttgacaagcctggtccaccaacaggacctattaagattgatgaaattgatgctacatcaattaccatttcctgggaaccacctgaattggacggtggtgctccactgagtggttatgtggtagaacaacgtgacgctcatcgtccaggatggctgcccgtttctgaatcagtgactaggtccacgtttaagtttaccagactcaccgaaggaaatgagtatgtgttccgtgtggctgcaacaaaccgcttcgggattggctcttacttgcagtctgaggtcatagagtgtcgcagcagcatccgtattcctggacccccagaaacattacagatatttgatgtttcccgtgatggcatgacacttacttggtacccaccagaggatgacggtggctcccaagtgactggatatattgtggagcgcaaagaagtgagagcagatcgatgggtccgtgtaaataaagtacctgtgacaatgacacggtaccgctccactggccttactgaaggcttagaatatgaacaccgtgtcacagccattaatgcaagagggtctgggaaaccaagtcgtccttccaaacccatcgttgccatggatccaattgctcctccaggaaagccacaaaacccaagagttactgatacaacaaggacatcagtctccctggcctggagtgttccagaagatgaaggaggatctaaagtcacaggctacttgattgaaatgcaaaaagtagatcaacatgaatggaccaagtgtaacaccactccaaccaagattcgagagtatactctaacacacctacctcagggtgcagaatacaggttccgcgtcctagcttgtaatgctggtggacctggtgagcctgctgaggtaccaggaacagtcaaagtcactgaaatgcttgaatatcctgattatgaacttgatgaaagataccaagaaggtatctttgtaaggcaaggtggcgtcatcagacttaccataccaatcaaaggaaaaccattcccaatatgtaaatggaccaaggaaggccaggatattagtaagcgtgccatgattgcaacatctgaaacacacactgagcttgtgatcaaagaagcagacaggggtgattctggcacttatgacctggttctggaaaataaatgtggcaagaaggctgtctacatcaaggtcagggtgataggaagtcccaacagtccagaagggccactggaatatgatgacatccaagtccgctctgtgagggtcagctggagacctcctgctgatgatggtggtgctgacatcttaggctacatcctcgagagacgagaagtgcctaaagccgcctggtataccattgattccagagtccgaggtacatctctggtggtaaaaggcctcaaagagaatgtagaataccatttccgtgtttcagcagaaaaccagtttggcataagcaaacccttgaaatctgaggaaccagtcacaccaaaaacaccattgaatcctccagaacctccaagcaatcctccagaagtactcgatgtaaccaagagttctgttagcttgtcctggtcccggcccaaagatgatggtggttctagagtcacaggctactacatcgaacgcaaagagacatccactgacaagtgggtcagacacaacaagactcagatcaccaccacaatgtacactgtcacagggcttgttcccgatgctgagtatcagttccgcatcatcgcacagaatgatgttggcctgagtgagaccagccctgcttctgaaccagttgtttgcaaagatccatttgataaaccaagccaaccaggagaacttgagattctttcaatatccaaagatagtgtcactctacagtgggagaaacctgaatgtgatggtggtaaagaaattcttggatactgggttgaatatagacagtctggagacagtgcctggaagaagagcaataaggaacgtattaaggacaagcaattcacaataggaggtttgctggaagctactgagtatgaattcagggtttttgctgagaatgagactgggctgagcagacctcgcagaactgctatgtctataaagactaaactcacatctggagaggccccaggaatacgcaaagaaatgaaggatgttaccacaaaattgggtgaagctgctcaactctcatgccagattgttggaaggcctcttcctgacattaaatggtacagatttggtaaagagctcatacaaagccggaaatacaaaatgtcttcagatggacgcacacacactcttacagtaatgacagaggaacaggaagatgaaggtgtttatacctgcatagccaccaatgaggttggagaagtagaaaccagtagtaagcttctcctgcaagcaacaccgcagttccatcctggttacccactgaaagagaaatattatggagctgtgggttccacacttcggcttcatgttatgtacattggtcgtccagtacctgccatgacttggttccatggtcagaaacttttgcaaaactcagaaaacattactattgaaaacactgagcactatactcatcttgtcatgaagaatgtccaacgtaagactcatgctgggaaatacaaagtccagctcagcaatgtttttggaacagttgatgccatccttgatgtggaaatacaagataaaccagacaaacctacaggaccaattgtgatcgaagctctattgaagaactccgcagtgatcagctggaaaccacccgcagatgacggaggctcctggatcaccaactatgtggtggaaaaatgtgaggccaaggagggggctgaatggcaattggtgtcttcagccatctcagtgacaacctgtagaattgtgaacctcacagaaaatgctggctattacttccgggtttcagctcagaacactttcggcatcagtgaccctctagaagtgtcctcagttgtgatcattaagagtccatttgaaaagccaggtgctcctggcaaaccaactattactgctgtcacaaaagattcttgtgttgtggcctggaagccacctgccagtgatggaggtgcaaagattagaaattactaccttgagaagcgtgagaagaagcagaataaatggatttctgtgacaacagaagaaattcgagaaactgtcttttcagtgaaaaaccttattgaaggtcttgaatacgagtttcgtgtgaaatgtgaaaatctaggtggggaaagtgaatggagtgaaatatcagaacccatcactcccaaatctgatgtcccaattcaggcaccacactttaaagaggaactgagaaatctaaatgtcagatatcagagcaatgctaccttggtctgcaaagtgactggtcatccaaaacctatcgtcaaatggtacagacaaggcaaagaaatcattgcagatggattaaaatataggattcaagaatttaagggtggctaccaccagctcatcattgcaagtgtcacagatgatgatgccacagtttaccaagtcagagctaccaaccaagggggatctgtgtctggcactgcctccttggaagtggaagttccagctaagatacacttacctaaaactcttgaaggcatgggagcagttcatgctctccgaggtgaagtggtcagcatcaagattcctttcagtggcaaaccagatcctgtgatcacctggcagaaaggacaagatctcattgacaataatggccactaccaagttattgtcacaagatccttcacatcacttgttttccccaatggggtagagagaaaagatgctggtttctatgtggtctgtgctaaaaacagatttggaattgatcagaagacagttgaactggatgtggctgatgttcctgacccacccagaggagtcaaagttagtgatgtctcacgagattctgtcaacttaacatggactgagccagcctctgatggtggcagcaaaatcaccaactacattgttgaaaaatgtgcaactactgcagaaagatggctccgtgtaggacaggcccgagaaacacgttataccgtgatcaacttatttggaaaaacaagttaccagttccgggtaatagctgaaaataaatttggtctgagcaagccttcagagccttcagaaccaaccataaccaaagaagataagaccagagctatgaactatgatgaagaggtagatgaaaccagggaagtctccatgactaaagcatctcactcttcaaccaaggaactctatgagaaatatatgattgctgaagatcttgggcgtggtgagtttggaattgtccatcgttgtgttgaaacatcctcaaagaagacatacatggccaaatttgttaaagtcaaagggactgatcaggttttggtaaagaaggaaatttccattctgaatattgctaggcatagaaacatcttacacctccatgaatcatttgaaagcatggaagaattagttatgatctttgagtttatatcaggacttgacatatttgagcgcattaacacaagtgcttttgaacttaatgaaagagaaattgtaagttatgttcaccaggtctgtgaagcacttcagtttttacacagtcataatattggacactttgacattagaccagaaaatatcatttaccaaaccagaagaagctctaccattaaaatcatagaatttggtcaagcccgtcagctgaaaccaggggacaacttcaggcttctattcactgccccagaatactatgcacctgaagtccaccagcatgatgttgtcagcacagccacagacatgtggtcacttggaacactggtatatgtgctattgagtggtatcaacccattcctggctgaaactaaccaacagatcattgagaatatcatgaatgctgaatatactttcgatgaggaagcattcaaagagattagcattgaagccatggattttgttgaccggttgttagtgaaagagaggaaatctcgcatgacagcatcggaggctctccagcacccatggttgaagcagaagatagaaagagtcagtactaaagttatcagaacattaaaacaccggcgttattaccacaccctgatcaagaaagacctcaacatggttgtgtcagcagcccggatctcctgtggtggtgcaattcgatctcagaagggagtgagtgttgctaaagttaaagtggcatccattgaaattggcccagtttctgggcagataatgcatgcagttggtgaagaaggaggacatgtcaaatatgtatgcaaaattgaaaattatgatcagtctacccaagtgacttggtactttggcgtccgacagctggagaacagtgagaaatacgaaatcacctacgaagatggagtggccatcctctatgtcaaagacattaccaaattagatgatggtacctacagatgcaaagtagtcaatgactatggtgaagacagttcttatgcagagctatttgttaaaggtgtgagagaagtctatgactattactgccgtagaaccatgaagaaaattaagcgcagaacagacacaatgagactcctggaaaggccaccagaatttaccctgcctctctataataagacagcttatgtaggtgaaaatgtccggtttggagtaactataactgtccacccagagcctcatgtaacatggtataaatcaggtcagaaaatcaaaccaggtgacaatgacaagaagtacacatttgagtcagacaagggtctttaccaattaacaatcaacagtgtcactacagatgatgacgctgaatatactgttgtggcaaggaacaaatatggtgaagacagctgtaaagcaaagctgacagtaaccctacacccacctccaacagatagtaccttaagacccatgttcaaaaggttactggcaaatgcagaatgccaagaaggccaaagtgtctgctttgagatcagagtgtctggcatccccccaccaacattaaaatgggagaaagatggtcagccactgtccctcgggcctaacattgaaattatccatgaaggcttggattattatgctctgcacatcagggacactttgcctgaagacacgggttattatagagtcacagccactaacacagctgggtccaccagctgccaggctcacctacaagtggaacgcctgaggtacaagaaacaggaattcaagagtaaggaggagcatgagcgacacgtacaaaaacaaattgacaaaaccctcagaatggctgaaattctttctggaactgaaagtgtaccactgacacaggtagctaaagaggctctgagagaagctgctgtcctttataaaccggctgtaagcaccaagactgtaaaaggggaattcagacttgagatagaagaaaagaaggaggagagaaaactccggatgccttatgatgtaccagagccacgcaagtataagcagactaccatagaagaagaccaacgcatcaagcagttcgtgcccatgtctgacatgaagtggtataaaaagatacgtgatcagtatgaaatgcctgggaaacttgacagagttgtacagaaacgacccaagcgcatccgcctttcaagatgggaacagttctatgtgatgcctcttccacgcattacagatcaatacagacctaaatggcgtattcctaaactgtcccaagatgatcttgagatagtgagaccagcccgccggcgtacaccttctcctgattatgacttttactaccgacctagaagacgttctcttggggacatctctgatgaagaattactcctccccattgatgactacttagcaatgaaaagaacagaggaagagaggctgcgtcttgaagaagagcttgagttaggtttttcagcttcacccccaagtcgaagccctccacactttgagctttctagcctacgttactcttcaccacaagctcatgtcaaggtggaggaaacaagaaaagacttcaggtattcaacctatcacatcccaacgaaggctgaagctagtacaagttatgcagaactgagggaacggcatgcccaggctgcgtacagacagccaaagcaacggcaaagaatcatggctgagagggaggatgaagagttgcttcgcccagttacgaccacccagcatctctcagaatacaaaagcgaacttgacttcatgtcaaaggaggaaaagtctagaaagaaatcaaggcgacaaagagaagtgacagaaataacagaaattgaggaagaatacgaaatctcaaaacatgctcaaagagaatcatcctcatctgcgtctagactactgagacgacggcgctccctgtctccaacttatattgagttaatgaggccagtgtctgagctgatccggtcacgtccacaaccggctgaggaatacgaagatgacacagaaagaaggtcacctactccagagagaactcgcccacgatcccccagccctgtgtctagtgagagatcactctcgagatttgagaggtctgcaagatttgatatcttttccaggtatgagtccatgaaagctgctttaaaaactcagaagacatcagaaaggaagtatgaagttttgagtcagcagcctttcacactggaccatgcccctcgaatcacactgagaatgcgctcgcacagggtaccatgtggccaaaatacacgttttattttaaatgttcagtctaagccaactgccgaggttaaatggtaccacaatggtgtggaactccaagaaagcagtaagattcattacaccaacacgagtggagtcctcaccctggaaattctggactgtcatactgatgacagtggaacctaccgtgctgtgtgcaccaactacaagggcgaagcttctgactatgcaacgttggacgtgacaggaggggattataccacctatgcttcccaacgcagagatgaagaggtccccagatctgttttccctgagctgacaagaacagaggcgtatgctgtttcatcatttaagaaaacatctgagatggaagcttcgtcttctgtcagggaagtgaaatcacagatgacggagacaagggaaagtctctcctcatatgaacactctgcatctgcagaaatgaaaagtgctgcattagaagaaaagtcactggaagaaaaatccacaaccagaaagatcaagacgactttggcagcaagaattctaacaaagccacggtccatgaccgtctacgagggcgagtctgcaaggttttcttgtgacaccgatggtgagccggtaccaactgtgacctggctgcgtaaaggacaagtgctaagtacttctgcccgccaccaagtgaccaccacaaagtacaaatcaacctttgagatctcttcagtccaggcttccgatgagggcaattacagcgtggtggtagaaaacagtgaagggaaacaagaagcagagttcactctgactattcaaaaggccagggtaactgaaaaggctgtgacatcaccaccaagagtcaaatccccagagcctcgggtgaaatccccagaagcagttaagtctccaaaacgagtgaaatctccagaaccttctcacccgaaagccgtatcacccacagagacaaaaccaacaccaacagagaaagttcagcacctcccagtctctgccccaccaaagattactcagttcctgaaagcagaagcttctaaagagattgcaaaactgacctgtgtggttgaaagcagtgtattaagggcaaaagaggtcacctggtataaagatggcaagaaactgaaggaaaatgggcatttccagtttcattattcagcagatggtacctatgagctcaaaatcaataacctcactgaatctgatcaaggagaatatgtttgtgagatttctggtgaaggtggaacgtctaaaaccaacttacaatttatggggcaagcctttaagagtatccatgagaaggtatcaaaaatatcagaaactaagaaatcagatcagaaaaccactgagtcaacagtaaccagaaaaactgaaccaaaagctcctgaaccaatttcctcaaaaccagtaattgttactgggttgcaggatacaactgtttcttcagacagtgttgctaaatttgcagttaaggctactggagaaccccggccaactgccatctggacaaaagatggaaaggccattacacaaggaggtaaatataaactctctgaagacaagggagggttcttcttagaaattcataagactgatacttctgacagtggactttatacttgtacagtaaaaaattcagctggatctgtgtcctctagctgcaaattaacaataaaagctataaaagatactgaggcacagaaagtctctacacaaaagacttctgaaattacacctcagaagaaagctgttgtccaagaggaaatttcccaaaaagccctaaggtctgaagaaattaagatgtcagaggcaaaatctcaagaaaagttagccctcaaagaggaagcttcaaaggttctgatttctgaagaagtcaagaaatcagcagcaacctccctggaaaaatccattgtccatgaggaaatcactaaaacatcacaggcatcagaagaagtcagaactcatgctgagattaaagcattttctactcagatgagcataaacgaaggtcaaagactggttttaaaagccaacattgctggtgccactgatgtgaaatgggtactgaatggcgtagagcttaccaactctgaggagtaccgatatggtgtctcaggcagcgatcagaccctaaccatcaagcaagccagtcacagagatgaaggaatcctcacctgcataagcaaaaccaaggaaggaatcgtcaagtgtcagtatgatttgacactgagcaaagaactctcagatgctccagccttcatctcacagcctagatctcaaaatattaatgaaggacaaaatgttctctttacttgtgaaatcagtggcgagccatcccctgaaatcgaatggtttaaaaacaacctgccaatttctatttcttcaaatgtcagcataagccgctccagaaatgtatactcccttgaaatccgaaatgcatcagtcagcgacagtggaaagtacacaattaaggccaaaaatttccgtggccagtgttcagctacagcttccttaatggtccttcctctagttgaagaaccttccagagaggtagtattgagaacaagtggtgacacaagcttgcaaggaagcttctcgtctcagtcagtccaaatgtctgcctccaagcaggaggcctccttcagcagtttcagcagcagcagtgctagcagcatgactgagatgaaatttgcaagcatgtctgcccaaagcatgtcctccatgcaagagtcctttgtagaaatgagttccagcagctttatgggaatatctaatatgacacaactggaaagctcaactagtaaaatgcttaaagcaggcataagaggaattccgcctaaaattgaagctcttccatctgatatcagcattgatgaaggcaaagttctaacagtagcctgtgctttcacgggtgagcctaccccagaagtaacatggtcctgtggtggaagaaaaatccacagtcaagaacaggggaggttccacattgaaaacacagatgacctgacaaccctgatcatcatggacgtacagaaacaagatggtggactttataccctgagtttagggaatgaatttggatctgactctgccactgtgaatatacatattcgatccatttaagagggcctgtgcccttatactctacactcattcttaacttttcgcaaacgtttcacacggactaatctttctgaactgtaaatatttaaagaaaaaaaagtagttttgtatcaacctaaatgagtcaaagttcaaaaatattcatttcaatcttttcataattgttgacctaagaatataatacatttgctagtgacatgtacatactgtatatagccggattaacggttataaagttttgtaccatttattttatgacattttacaatgtaagttttgaaactaactgttggtaggagaaagtttcttatggaacgaataccctgctcaacatttaatcaatctttgtgcctcaacatactgttgatgtctaagtatgcctcagtgggttgagaaaatccccattgaagatgtcctgtccacctaaaagagaatgatgctgtgcatatcacttgatatgtgcaccaatacctactgaatcagaaatgtaaggcattggtgatgtttgcatttaccctcctgtaagcaacactttaacgtcttacattttctctgatgatgtcacacaaaattatcatgacaaatattaccagagcaaagtgtaacggccaacactttgttcgctcattttacgctgtctctgacataaggagtgcctgaatagcttggaaaagtaacatctcctggccatcccttcatttaaccaagctattcaagtattcctatgccagagcagtgccaactcttggaggtcccagagtgcagccaatgcctttgtgtggtagttctaaattttaattgcacctgaaaaacctgggcacctaagcaatgagccacagcaaaaagtaaagaacaacaacaaaataaagctgttgttaaattttaaacaatattactaattgcccaaaatgtcaatttgatgtagttcttttcatgcaagtataaattcaattgttagttataattgttggacctccttgagatagtaacaacaaaataaagcaagctatctgcacctcaaaa

SEQ ID NO: 104 - DNA, 2181 bp, Homo sapiens
agaagccgagcggcgcagaggacgccagggcgcgcgccgcagccacccaccctccggaccgcggcagctgctgacccgccatcgccatggcccgcgggaaagccaaggaggagggcagctggaagaaattcatctggaactcagagaagaaggagtttctgggcaggaccggtggcagttggtttaagatccttctattctacgtaatattttatggctgcctggctggcatcttcatcggaaccatccaagtgatgctgctcaccatcagtgaatttaagcccacatatcaggaccgagtggccccgccaggattaacacagattcctcagatccagaagactgaaatttcctttcgtcctaatgatcccaagagctatgaggcatatgtactgaacatagttaggttcctggaaaagtacaaagattcagcccagagggatgacatgatttttgaagattgtggcgatgtgcccagtgaaccgaaagaacgaggagactttaatcatgaacgaggagagcgaaaggtctgcagattcaagcttgaatggctgggaaattgctctggattaaatgatgaaacttatggctacaaagagggcaaaccgtgcattattataaagctcaaccgagttctaggcttcaaacctaagcctcccaagaatgagtccttggagacttacccagtgatgaagtataacccaaatgtccttcccgttcagtgcactggcaagcgagatgaagataaggataaagttggaaatgtggagtattttggactgggcaactcccctggttttcctctgcagtattatccgtactatggcaaactcctgcagcccaaatacctgcagcccctgctggccgtacagttcaccaatcttaccatggacactgaaattcgcatagagtgtaaggcgtacggtgagaacattgggtacagtgagaaagaccgttttcagggacgttttgatgtaaaaattgaagttaagagctgatcacaagcacaaatctttcccactagccatttaataagttaaaaaaagatacaaaaacaaaaacctactagtcttgaacaaactgtcatacgtatgggacctacacttaatctatatgctttacactagctttctgcatttaataggttagaatgtaaattaaagtgtagcaatagcaacaaaatatttattctactgtaaatgacaaaagaaaaagaaaaattgagccttgggacgtgcccatttttactgtaaattatgattccgtaactgacttgtagtaagcagtgtttctggcccctaagtattgctgccttgtgtattttatttagtgtacagtactacaggtgcatactctggtcatttttcaagccatgttttattgtatctgttttctactttatgtgagcaaggtttgctgtccaaggtgtaaatattcaacgggaataaaactggcatggtaattttttttttttttttttttttgttttttggctctttcaaaggtaatggcccatcgatgagcatttttaacatactccatagtcttttcctgtggtgttaggtctttatttttatttttttcctgggggctggggtgggggtttgtcatgggggaactgccctttaaattttaagtgacactacagaaaaacacaaaaaggtgatgggttgtgttatgcttgtattgaatgctgtcttgacatctcttgccttgtcctccggtatgttctaaagctgtgtctgagatctggatctgcccatcactttggctagtgacagggctaattaatttgctttatacattttcttttactttccttttttcctttctggaggcatcacatgctggtgctgtgtctttatgaatgttttaaccattttcatggtggaagaattttatatttatgcagttgtacaattttatttttttctgcaagaaaaagtgtaatgtatgaaataaaccaaagtcacttgtttgaaaataaatctttattttgaactttataaaaagcaatgcagtaccccatagactggtgttaaatgttgtctacagtgcaaaatccatgttctaacatatgtaataattgccaggagtacagtgctcttgttgatcttgtattcagtcaggttaaaacaacggacaataaaagaatgaacacaaaaaaaaaaaaaaaaaaaa

SEQ ID NO: 105 - DNA, 2230 bp, Homo sapiens
ggcggggagggggcagtccacgaacttttgtcattcagcctgggagaccacggtgacattcctgtctgcgctgcgggcaggccagcctctccggccctggactagggggcgccgccgagagaagccgccgcaggctgcagagtcgccgaccgcgctgttcgcaggcagaccccgggctgcccaccgcggcctagcgcgcgccggatggcaggagaagtgtccgcggccacgggccgcttttcgctggagcggttgggcctcccgggcctggccctcgccgcggccctgctgctcctggccctctgcttgcttgtccggcgcaccaggagacccggtgagcctccattgataaaaggttggcttccttatcttggagtggtcctgaacttacgaaaagaccccttaaggttcatgaaaacacttcaaaagcaacatggtgacactttcacagttcttcttggtggaaagtacataacatttatcctggaccccttccagtaccagctagtgataaaaaatcataaacaattaagctttcgagtattttctaataaattattagagaaagcatttagcatcagtcagttgcaaaaaaatcatgacatgaatgatgagcttcacctctgctatcaatttttgcaaggcaaatctttggacatactcttggaaagcatgatgcagaatctaaaacaagtttttgaaccccagctgttaaaaaccacaagttgggacacggcagaactgtatccattctgcagctcaataatatttgagatcacatttacaactatatatggaaaagttattgtttgtgacaacaacaaatttattagtgagctaagagatgattttttaaaatttgatgacaagtttgcatatttagtatccaacatacccattgagcttctaggaaatgtcaagtctattagagagaaaattataaaatgcttctcatcagaaaagttagccaagatgcaaggatggtcagaagtttttcaaagcaggcaagatgtcctggagaaatattatgtgcacgaggaccttgaaataggagcacatcatttaggctttctctgggcctctgtggcaaacactattccaactatgttctgggcaatgtattatcttctgcggcacccagaagctatggcagcagtgcgtgacgaaattgaccgtttgctgcagtcaacaggtcaaaagaaagggtctggatttcccatccacctcaccagagaacaattggacagcctaatctgcctagaaagcagcatttttgaagctttacgactgtcctcatattcaaccaccattcgttttgttgaggaggatttgactctcagttcagagaccggggactactgtgtgcgaaagggagacttggtagccatctttcctccagtcctacatggtgaccctgaaatctttgaagctccagaggagtttagatatgatcgttttatagaagatggtaagaagaaaaccacctttttcaaaagagggaaaaagctgaagtgttacctaatgccgtttggaactggaaccagcaaatgtccaggccgattttttgcacttatggaaataaaacaattgttggttatacttttaacttattttgatttagaaataattgatgataagcccataggactaaactacagccgcttgttgtttggtattcagtatccagattctgatgttttatttagatacaaagtgaaatcttagagaagctaaaaggaaagaaaataaatctatcaaaattaccctaaacatcctaagctcatctatttctttttaatttctgcaaagtaattgatttatttgtttaaaaagcgctaatttctatttgatctgatatcagtccagtttgtccttagtcacaaagcccatataatataaaacaggatggtggcaggaaaatggacatcaaaatcaacttaagggtaggctcaaaacagggttgttgttgtttttttagtttctccttgttgtgattttcacctgttataataaatgtaccttcacaccaatagattgggcactgtggaatttaaatcactcaaattgttctctaatatgtaaaattacactttgaactactagaaaattgtgctggaaatggacacagtctaacaaattccaaattctcacagaagaaggaaattgaatttccatgagttacactggatgaaaatgtttcccttaagcatatattaataatacctatatc

SEQ ID NO: 106 - DNA, 1195 bp, Homo sapiens
atgcccacctgcaccaagtggtctcgggtggatagccatgggaactggacaggaatctgggtgtgcctgggcatggcgcggtggggggaagagggagagtcagaaagaatgcctgacctgtggacacggacatggctggagaccttcacaccaaccctgagggaggacagacagaaagggggtgtggtcggggggcggaggaagagcgagacagagaaagcgcttcggcggctgcagctcgggcggcggccgcgggggacaaagggcgggcggatcggcggggagggggcggggcgcggccaggccaagcccgggggctccgcatgctgcagctgcccccgggcgcccccgccgccgccctcgccgcggagccgcgcggagcggagccggcgagctaacccgagccagccggcgggcgtcccggaggcggtggcgcagggaggggcccgacgctcgcacgtggccccggcggccgccatggcggacagcggcaccgcggggggcgcggcgttggcggccccggcccccgggccgggcagtggcggcccaggaccacgcgtctactttcagagcccccccggggccgcaggagagggcccgggcggggcggacgatgagggcccagtgaggcgccaagggaaggtcaccgtcaagtatgaccgcaaggagctacggaagcgcctcaacctagaggagtggatcctggagcagctcacgcgcctctacgactgccaggaagaggagatcccagaactggagattgacgtggatgagctcctggacatggagagtgacgatgcccgggctgccagggtcaaggagctgctggttgactgttacaaacccacagaggccttcatttctggcctgctggacaagatccggggcatgcagaagctgagcacaccccagaagaagtgacggtccccgacccaggagaacggtggctcccacaggacaatcgctgccccccaacctcgtagcaacagcaataccgggggaccctgcggccaggcctggtgccatgagcagggctcctcgtgcccctggcccaggggtctcttcccctgccccctcagttttccacttttggggttttttattgttattaaactgatgggactttttgtgtttttatattgactctgcggcgcgggccctttaataaagctaggatacgcctttggtgcagcta

SEQ ID NO: 107 - DNA, 1233 bp, Homo sapiens
ccccactggctgctctgaaaagccatctttgcattgttcctcatccgcctccttgctcgccgcagccgcctccgccgcgcgcctcctccgccgccgcggactccggcagctttatcgccagagtccctgaactctcgctttctttttaatcccctgcatcggatcaccggcgtgccccaccatgtcagacgcagccgtagacaccagctccgaaatcaccaccaaggacttaaaggagaagaaggaagttgtggaagaggcagaaaatggaagagacgcccctgctaacgggaatgctaatgaggaaaatggggagcaggaggctgacaatgaggtagacgaagaagaggaagaaggtggggaggaagaggaggaggaagaagaaggtgatggtgaggaggagggtggagatgaagatgaggaagctgagtcagctacgggcaagcgggcagctgaagatgatgaggatgacgatgtcgataccaagaagcagaagaccgacgaggatgactagacagcaaaaaaggaaaagttaaactaaaaaaaaaaaggccgccgtgacctattcaccctccacttcccgtctcagaatctaaacgtggtcaccttcgagtagagaggcccgcccgcccaccgtgggcagtgccacccgcagatgacacgcgctctccaccacccaacccaaaccatgagaatttgcaacaggggaggaaaaaagaaccaaaacttccaaggccctgctttttttcttaaaagtactttaaaaaggaaatttgtttgtattttttatttacattttatatttttgtacatattgttagggtcagccatttttaatgatctcggatgaccaaaccagccttcggagcgttctctgtcctacttctgactttacttgtggtgtgaccatgttcattataatctcaaaggagaaaaaaaaccttgtaaaaaaagcaaaaatgacaacagaaaaacaatcttattccgagcattccagtaacttttttgtgtatgtacttagctgtactataagtagttggtttgtatgagatggttaaaaaggccaaagataaaaggtttctttttttttccttttttgtctatgaagttgctgtttattttttttggcctgtttgatgtatgtgtgaaacaatgttgtccaacaataaacaggaattttattttgctgagttgttctaacagaaaaaaaaaaaaaaaaaaaaaaaaaaaaaa

SEQ ID NO: 108 - DNA, 2787 bp, Homo sapiens
gcacagacgagatctcgatcgaaggcgagatggcggacgtgctagatcttcacgaggctgggggcgaagatttcgccatggatgaggatggggacgagagcattcacaaactgaaagaaaaagcgaagaaacggaagggtcgcggctttggctccgaagaggggtcccgagcgcggatgcgtgaggattatgacagcgtggagcaggatggcgatgaacccggaccacaacgctctgttgaaggctggattctctttgtaactggagtccatgaggaagccaccgaagaagacatacacgacaaattcgcagaatatggggaaattaaaaacattcatctcaacctcgacaggcgaacaggatatctgaaggggtatactctagttgaatatgaaacatacaaggaagcccaggctgctatggagggactcaatggccaggatttgatgggacagcccatcagcgttgactggtgttttgttcggggtccaccaaaaggcaagaggagaggtggccgaagacgcagcagaagtccagaccggagacgtcgctgacaggtcctctgttgtccaggtgttctcttcaagattccatttgaccatgcagccttggacaaataggactggggtggaacttgctgtgtttatatttaatctcttaccgtatatgcgtagtatttgagttgcgaataaatgttccatttttgttttctacatttaatgttactttcctgtcctaaaattgaaagttctaaagcatagcaaggctgtatggatcattgtgaagatacttctagggactgaactctatgtatttcttttttttcttttttttgagatagagtcttgctgtgttacccagggtggattgcagctgatcatagctcactgcagcttcaaactcttgggctcaagccatccttctgcctcactgtccctagtagttgggattacaggcacatgccaccatgcccagctaaatttttaatatttttgtagagatggggtcttgctgtgttacctgggctagttatgtgagtttctatattagacatagtctcaagtttcaggtagggtttaaagtagagacactggtcagtatttcttttttggggggaactaggagagcaggagtagaagtgagatgttaagatcttatggcactaaagacttactattctgttcctacatactctgttaggatcagatagatgttatagaaatgccttttgtttctcctgcccttcttgatgtcacagttttttgtacttccagctgtctaaaggcatgaatctcctcttggagcattctcccagacccttctttagaagagtctatactaagttcttggtgccctcttcggcagccaagggtgaaggccccatagaggagaggatccaaaggagcattgaggaggcccaagaggaaaaggatgtggctcaggctgggagggacttcagttagcatggtgggggagaaccagtaccacatacccagtaggtaataaggtgtccagcagaggatgaaggtcagcaagataagcagggccagtctcagggcccggagacgaacacggggacaattgtcaaaggagcgggggagggcaaattcaccagcaggggctaggaatttagaaaatatactgtaattcagacactcagcttctgatctgagtatagggtgaattgatggaggggcatagctagtgagacagagctcgcctcctacaaggaggagaatgttgcaaaccgttttccccttcccaacctgggactatatgatttcttacccccagggattatgatagaaatatgaagccaccaagtctagacttgatggtgttcaagaataaataatactgattgcctccctagtccttgtccagctaactcagctgtttataattgaagggattcaacaaaattatctctagcatcaggtgctagacatggttagaatctcaccatggtttagtgactggtagatagctattaggtaggtagataaataaatgatgctagaggcaacaggtctagggttaaggattaaggcctgggaattggagtctcaccatggctccccttccttgtctggggcctggacacactgaggacaatgcggctatagcagatggccatggcagtcagtggcagcagaaagaggcagcagaaggtgaagaggttataggtggtctcttgccattgagccttgaagctgcctttggtgacacactgagtgaaagggactgggccagctcagtggaccgtgtggaacaggaacagctggagtggagttgaggactattagaactggttcccctcaccacccaacctacccacctatgtcatactgtctcctcccaattcatccttaattccaagtgaagcagcacagtgctgagaaacagttcatccatggtgccatgttaaagaagttggaaatatatcttgaaaatcctatcttccttttaggcttgaatatgatgctgaacagtaagtttgttaaatcttggaacttaaaacaatcctgctttctcaagtactattctaacattgcgctttataagggatgatatttctaccacctcactcatatttttagctgaaatgattttcctggtatgtctgttattttgtggaaaaagaaatattgtgtaaaatgggtgctgccaaaattccaggccattttgcagggactctgaagtgacctttagtagtaatagtcttatgtgcagtaactataatggtaaagaatgttaaataataaaatttaacattttccaaatgct

SEQ ID NO: 109 - DNA, 68 bp, Homo sapiens
gtgcaatgatgtattttattcaacacatcattctgaaagaacgtgtggaaaactaatgactgagcaca

SEQ ID NO: 110 - DNA, 1110 bp, Homo sapiens
cctgggcggctccgctagctgtttttcgtcttccctaggctatttctgccgggcgctccgcgaagatgcagctcaagccgatggagatcaaccccgagatgctgaacaaagtgctgtcccggctgggggtcgccggccagtggcgcttcgtggacgtgctggggctggaagaggagtctctgggctcggtgccagcgcctgcctgcgcgctgctgctgctgtttcccctcacggcccagcatgagaacttcaggaaaaagcagattgaagagctgaagggacaagaagttagtcctaaagtgtacttcatgaagcagaccattgggaattcctgtggcacaatcggacttattcacgcagtggccaataatcaagacaaactgggatttgaggatggatcagttctgaaacagtttctttctgaaacagagaaaatgtcccctgaagacagagcaaaatgctttgaaaagaatgaggccatacaggcagcccatgatgccgtggcacaggaaggccaatgtcgggtagatgacaaggtgaatttccattttattctgtttaacaacgtggatggccacctctatgaacttgatggacgaatgccttttccggtgaaccatggcgccagttcagaggacaccctgctgaaggacgctgccaaggtctgcagagaattcaccgagcgtgagcaaggagaagtccgcttctctgccgtggctctctgcaaggcagcctaatgctctgtgggagggactttgctgatttcccctcttcccttcaacatgaaaatatatacccccccatgcagtctaaaatgcttcagtacttgtgaaacacagctgttcttctgttctgcagacacgccttcccctcagccacacccaggcacttaagcacaagcagagtgcacagctgtccactgggccattgtggtgtgagcttcagatggtgaagcattctccccagtgtatgtcttgtatccgatatctaacgctttaaatggctactttggtttctgtctgtaagttaagaccttggatgtggtttaattgtttgtcctcaaaaggaataaaacttttctgctgataagataaaaaaaaaaaaaaaaaa

SEQ ID NO: 111 - DNA, 2306 bp, Homo sapiens
tgcggtgagggggcgagccgtgaagatggcggcagtggtggaggtggaggttggaggtggtgctgctggggaacgggagctggatgaggttgatatgtcagatctctctccagaagagcaatggagggtcgagcacgcacgcatgcatgccaagcaccgtggccatgaagctatgcatgctgaaatggtcctcatcctcatcgcaaccttggtggtggcccagctgctcctggtgcagtggaagcagaggcacccacgctcctacaatatggtgaccctctttcagatgtgggttgttcccctctatttcacagtgaagctgcactggtggaggttcctagtgatctggatcttgttctctgctgtcacagcctttgttaccttccgagccacccgaaaacctctagtacagacaaccccaaggttggtttataagtggttcctgctaatctataaaatcagctatgccactggcattgttggctacatggctgtcatgtttaccctctttggtcttaacttattattcaagatcaaaccagaagatgccatggactttggcatctcccttctcttctatggcctctactatggagttctggaacgggactttgcagaaatgtgtgcagactacatggcatctaccatagggttctacagcgagtcgggcatgcctaccaaacatctttcagacagtgtgtgtgctgtgtgtgggcagcagatctttgtggacgtcagtgaagaggggatcattgagaacacgtataggctgtcctgcaatcatgtcttccacgagttctgcatccgtggctggtgcatcgtgggaaagaagcaaacgtgtccctactgcaaagagaaggtagacctcaagaggatgttcagcaatccctgggagaggcctcacgtcatgtatgggcaactgctggactggcttcgatacttggtagcctggcagcctgtcatcattggtgtagtccaaggcatcaactacatcctgggcctggaatagtgatgaagagcatcagtggaaaacccaccccacacgccatggacctcagggcactctcctccctgcccacaaagacctcctgggtgggaaagactcaaaggggtgcttgggccactcaggacccctctggctgtgtcggactggggagggatatgatggagagccagccagtggggctgtcagcagtggggggctttttaaaagaaaactattttgatgaatatatttaaaaaacctttttttattgtggagcataggaattgcccccctccaggcttcaccctccctgcctaagcagggtgggggcagagccatgacatttttggtttaaaggagccttctcatctctggccgagaacactgctgggctcccaggtagctgaaggcctcagcccacccactcccttcttccctgtgtggggctcaagcctggtgcacttagtatagaagagctaacgtactcaggcttgtgccacgggtgagcactgaggccccaggtgtcctccctcccccactgtctgggacacaggacaggtgttgcgtctgactctgtctccccctgtccaagagctataggctggttgaggcaagtggaaccttatcagtgacttggccaacaagggaagccttggggcctcagaattcattgaagatttgttttgggacaactggaagaatcagcaccatggatactcgcccgtgggcagggctgtggtcagccaagaatagaggtcatatagttgggccatggggcaattgttggcagccatgactgacggccccttgtgcaagctcattcttcagtggatccttcagtggagtggtgacacgtgccagcggtcactctgccacatcacttccttcttgaaagcctaagagtgcgtatgcgtgtgtgtgtgtgtgtgtgtgtacgtgaggcagaagaatatgacagatgtcagcttctccctgtgtcagatgatatgtccttgaagctggcaggggattcccagtccagggaatatccctacatgatttttgtcattcatgggtcctccctgggcctgacaacgggagtggtgggtgggtgagaacaggttctgagagggggcttctaggaaggccccagccctagtcctaggcgacttgaataaagtgggaggtcaaacatgggccttcggcattgggtttctagggaatatggctcagtagggcctgccccttcaagggcagcaagaacgaagcaggatgttgtcactcccgtctgaataaagctccatgagctgggttggaaagctgaaaaaaaaaaaaaaaaaaa

SEQ ID NO: 112 - DNA, 2010 bp, Homo sapiens
gtcgactaccagaaaatactttcaacataaatgaactctccaacttattaaacttttatatagatagaggaagacagctctttcgggataaccacctgatacctgcagaaacccccagtcctgttattttcagtgattttccatttatctttaattcgctatccaaaattaaattattgcaagctgattcacatataaagatgcagatgtcagaaaagaaagcatacatgcttatgcatgaaacaattctgcaaaaaaaggatgaatttcctccatcacccagatttatacttagagtcagacgaagtcgcctggttaaagatgctctgcgtcaattaagtcaagctgaagctactgacttctgcaaagtattagtggttgaatttattaatgaaatttgtcctgagtctggaggggttagttcagagttcttccactgtatgtttgaagagatgaccaagccagaatatggaatgttcatgtatcctgaaatgtgttcctgcatgtggtttcctgccaagcctaaacctgagaagaaaagatatttcctctttggaatgctgtgtggactctccttattcaatttaaatgttgctaaccttcctttcccactggctctgtataaaaaacttctggaccaaaagccatcattggaagatttaaaagaactcagtcctcggttggggaagagtttgcaagaagttctagatgatgctgctgatgacattggagatgcgctctgcatacgcttttctatacactgggaccaaaatgatgttgacttaattccaaatgggatctccatacctgtggaccaaaccaacaagagagactatgtttctaagtatattgattacattttcaacgtctctgtaaaagcagtttatgaggaatttcagagaggattttatagagtctgtgagaaggagatacttagacatttctaccctgaagaactaatgacagcaatcattggaaatactgattatgactggaaacagtttgaacagaattcaaagtatgagcaaggataccaaaaatcacatcctactatacagttgttttggaaggctttccacaagctaaccttggatgaaaagaaaaaattcctctttttccttacaggacgtgataggctgcatgcaagaggcatacagaaaatggaaatagtatttcgctgtcctgaaactttcagtgaaagagatcacccaacatcaataacttgtcataatattctctccctccctaagtattctacaatggaaagaatggaggaagcactccaagtagccatcaacaacaacagaggatttgtctcacccatgctcacacagtcataatcacctctgagagactcagggtgggctttctcacacttggatccttctgttcttccttacacctaaataatacaagagattaatgaatagtggttagaagtagttgagggagagattgggggaatggggagatgatgatgatggtcaaagggtgcaaaatctcacacaagactgaggcaggagaatagggtacagagatagggatctaaggatgacttggacacactccctggcactgaagagtctgaacactggcctgtgattggtccattccaggaccttcatttgcataaggtatcaaaccacatcagcctctgattggccatgggccagacctgcactctggccaatgattggttcattccaggacattcatttgcataaggagtcaaaccacaccagtcttggattggctgtgagccaattcacctcagtctctaattggctgtgagtcagtctttcatttacatagggtgtaaccatcaagaaacctctacagggtacttaagccccagaagattttgctaccagggctcttgagccacttgctctagcccactcccaccctgtggaatgtactttcacttttgctgcttcactgccttgtgctccaataaatccactccttcaccacccaaaaaaaaaaaaaaaaaaaaaaaaaaaaaaaaaa

SEQ ID NO: 113 - DNA, 3606 bp, Homo sapiens
gatgagaagaaggagctgcattggatggaaggcccacccccgagccaccccctctaccacaccatgccaccgccctgcccaggcagccctgggcacaggagcccacagagatgagaggcaagaagacccagggagaaggccactgagatgaggggagagggctacagagatgaagagaaatgaagagaagagagacagccgtcaagactgtccagagaagtgggctgaggcccacaaaccccacaaggacaaggacaggaaaagcccagggataagaaagaaaggcccatggagacaagggagcagcctacagagacaagcaaaaggacctcggagacaaggggcagtaatgtggacatagagacctcccgcgaaggaaaacgggagaagccagagacacaagagagaggcccctggaaacagaaagcactcctcagatatggggagcggtccacagggcagggagagagccaaggagagccgaagaaggtcacagaaacaagggaggcctacagacaccagggtaccaaaaagacaaggatgtggctcatagacacaagagagccactgaggcaggagctgccagcctggagatgcggggcaagcctcccccaatataaatagctcctatagagcccagggccttgctgccgccatgactgaggaatcagaggagacagtcctgtacattgagcaccgctatgtctgctctgagtgcaaccagctgtatggatcactggaagaggtgcttatgcaccaaaactcccacgtgccccagcagcactttgagctggtgggcgtggctgatcccggagtcactgtggccacagacacagcttcaggcacgggcctctatcagacccttgtgcaggagagccagtaccagtgcctggagtgtggtcaactgctgatgtcacccagccagctcctggagcaccaggagctgcacctgaagatgatggcaccccaggaggcagtgccagctgagccatcacctaaggcaccacccctgagctccagcaccatccactacgagtgtgtggattgcaaggccctctttgccagccaggagctctggctgaaccaccggcagacgcacctccgggccacacccaccaaggctcctgcccctgttgtcctggggtccccagttgttctagggcctcctgtgggccaggcccgagtggctgtggagcactcataccgaaaggcagaagagggtggggaaggggcgactgtcccatctgccgctgccaccaccactgaggtagtgactgaggtggagctgctcctctacaagtgctctgagtgctcccagctcttccagctgccggcggatttcctggagcaccaggccactcacttccctgctcctgtacccgagtctcaggagcctgccttacagcaggaggtgcaggcctcgtcacctgcagaggtgcctgtgtctcagcctgaccccttgccagcttctgaccacagttacgagctgcgcaatggtgaagccattgggcgggatcgccgggggcgcagggcccggaggaacaacagtggagaagcaggcggggcagccacacaggagctcttctgctcagcctgtgaccagctctttctctcaccccaccagctacagcagcacctgcggagtcatcgggagggcgtctttaagtgccccctgtgcagtcgtgtcttccctagcccttccagtctggaccagcaccttggagaccatagcagcgagtcacacttcctgtgtgtagactgtggcctggccttcggcacagaggccctcctcctggcccaccggcgagcccacaccccgaatcctctgcattcatgtccatgtgggaagacctttgtcaaccttaccaagttcctttatcaccggcgtactcatggggtagggggtgtccctctgcccacaacaccagtcccaccagaggaacctgtcattggtttccctgagccagccccagcagagactggagagccagaggcccctgagccccctgtgtctgaggagacctcagcagggcccgctgccccaggcacctaccgctgcctcctgtgcagccgtgaatttggaaaggccttgcagctgacccggcaccaacgttttgtgcatcggctggagcggcgccataaatgcagcatttgtggcaagatgttcaagaagaagtctcacgtgcgtaaccgcctgcgcacacacacaggggagcggcccttcccctgccctgactgctccaagcccttcaactcacctgccaacctggcccgccaccggctcacacacacaggagagcggccctaccggtgtggggactgtggcaaggctttcacgcaaagctccacactgaggcagcaccgcttggtgcatgcccagcacttcccctaccgctgccaggaatgtggggtgcgttttcaccgtccttaccgcctgctcatgcaccgctaccatcacacaggtgaatacccctacaagtgtcgcgagtgcccccgctccttcttgctgcgtcggctgctggaggtgcaccagctcgtggtccatgccgggcgccagccccaccgctgcccatcctgtggggctgccttcccctcctcactgcggctccgggagcaccgctgtgcagccgctgctgcccaggccccacggcgctttgagtgtggcacctgtggcaagaaagtgggctcagctgctcgactgcaggcacacgaggcggcccatgcagctgctgggcctggagaggtcctggctaaggagccccctgcccctcgagccccacgggccactcgtgcaccagttgcctctccagcagcccttggaagcactgctacagcatcccctgcggcccctgcccgccgccggggtctagagtgcagcgagtgcaagaagctgttcagcacagagacgtcactgcaggtgcaccggcgcatccacacaggtgagcggccatacccatgtccagactgtggcaaagcgttccgtcagagtacccacctgaaagaccaccggcgcctgcacacaggtgagcggccctttgcctgtgaagtgtgtggcaaggcctttgccatctccatgcgcctggcagaacatcgccgcatccacacaggcgaacgaccctactcctgccctgactgtggcaagagctaccgctccttctccaacctctggaagcaccgcaagacccatcagcagcagcatcaggcagctgtgcggcagcagctggcagaggcggaggctgccgttggcctggccgtcatggagactgctgtggaggcgctacccctggtggaagccattgagatctaccctctggccgaggctgagggggtccagatcagtggctgactctgcccgacttcctctttggcacctccattccctgttgctgaaggccctccagcatccccttaagcatctgtacatactgtgtcccttcctcttcccatccccaccaccttgtaagttctaaattggatttattctctcgtgaggggggtgctctggggtccttgacacacataaaggtgcccccccaccttccacctcttagcactggtgaccccaaaaatgaaaccatcaataaagactgagttgccaaaaaaaac

SEQ ID NO: 114 - DNA, 4467 bp, Homo sapiens
agcctggacaggctttccagatggctgcggcggtcggtcggtgaggctttcccggctgtggtttggctgcgggcggcttgggcagcccgcgggcgcctcaggtagaagaagaaaggtgccactccggcatgaagacagactcgcttagtcgccagtcacttaagctgagtgcattgtgatttccaataattgaggcagtggttctaaaagctgtctacattaatgaaaagagcaatgtggccagcttgactaagccgccagcgcacagcgcggcaggacgcgcccgggtctcagcggacttgtgcatgttagctgtgtagatttatgtgagggcttgtaaaactctggtcttgtaaactagtcttaagcgcttttaatatggagacagatgagagcccctctccgctcccgtgtgggcccgcaggagaagcggtgatggagagccgagctcgccccttccaagcgctgccccgtgagcagtctccaccacctcccctgcaaacgtccagtggtgcagaggtaatggacgttggctctggtggtgatggacagtccgaactccctgctgaggaccccttcaacttctacggagcttctcttctctccaaaggatccttctctaagggccgcctcctcatagacccgaactgtagtggccacagcccgcgcaccgcccggcacgcacctgcggtccggaagttctcccctgaccttaagttgcttaaggatgtaaagattagcgtgagctttaccgagagctgcaggagtaaggacaggaaggtgctgtacacaggagcagagcgcgacgtgcgggcggagtgcggtctgctccttagccctgtcagtggggacgtgcatgcttgtccctttggcgggagtgttggtgacggggtaggcatagggggtgagagtgctgataagaaggatgaggagaatgagctggatcaggaaaagagagtggagtatgcagtgctcgatgagttagaagattttactgacaatttggagctagatgaagaaggagcaggcgggttcacggctaaagcaatcgttcagagagacagagtggatgaagaggccttgaatttcccctacgaggatgactttgacaacgatgtggatgctctgctggaagaaggcctttgtgcccccaaaaagaggcgaacagaggaaaaatatggcggagacagcgaccatccgtccgatggagagacaagtgtgcagccgatgatgaccaagattaaaacagtgctcaaaagtcgtggccgcccacctacagagccgctgcccgacgggtggatcatgacattccataactctggagtcccggtgtacctacacagagagtctcgggtggtcacctggtccaggccatacttcttgggaacgggaagcatacggaaacacgaccctcctctgagtagcatcccttgtctgcattataagaaaatgaaggacaacgaggaacgggagcaaagcagtgacctcacccctagtggggatgtgtcccccgtcaagcccctgagccgatctgcagagctggagtttcccctggatgagcctgactctatgggtgctgacccggggcccccggacgagaaagacccactaggggctgaggcagcccctggggccctggggcaggtgaaggccaaagtcgaggtgtgcaaagatgaatccgttgatctcgaggaatttcgaagctacctggagaagcgttttgactttgagcaagttactgtgaaaaaattcaggacttgggctgagcggcggcaattcaatcgggaaatgaagcggaagcaggcggagtccgagaggcccatcttgccagccaatcagaagctcattactttatcagtgcaagatgcacccacaaagaaagagtttgttattaaccccaacgggaaatccgaggtctgcatcctgcacgagtacatgcagcgtgtcctcaaggtccgccctgtctataatttctttgaatgtgagaacccaagtgagccttttggtgcctcggtgaccattgatggtgtgacttacggatctggaactgcaagcagcaaaaaacttgcgaagaataaagctgcccgagctacactggaaatcctcatccctgactttgttaaacagacctctgaagagaagcccaaagacagtgaagaactcgagtattttaaccacatcagcatcgaggactcgcgggtctacgagctgaccagcaaggctgggctgttgtctccatatcagatcctccacgagtgccttaaaagaaaccatgggatgggtgacacgtctatcaagtttgaagtggttcctgggaaaaaccagaagagtgaatacgtcatggcgtgtggcaagcacacagtgcgcgggtggtgtaagaacaagagagttggaaagcagttagcctcacagaagatccttcagctgctgcacccacatgtcaagaactgggggtctttactgcgcatgtatggccgtgagagcagcaagatggtcaagcaggagacatcggacaagagtgtgattgagctgcagcagtatgccaagaagaacaagcccaacctgcacatcctcagcaagctccaagaggagatgaagaggctagctgaggaaagggaggagactcgaaagaagcccaagatgtccattgtggcgtccgcccagcctggcggtgagcccctgtgcaccgtggacgtgtgagggaggtggcacgggccagggcgcgggggccgccagccgcacttctgaggagaccagcagtcatgcatcgtgcaccacagtgtcaggcctccaacccacgctccttccctgtggccaacctgtgggcccggccttagggtggaggctttagtgtacagggacagccatggccacacagcacacatgtggagcagcggctctccctggaaagctccaggcctgaatggatggactcagcgactgcaccagtggcagctggtgactgtggacagtggtggaccctgcttctgtgcacctgctgcaggctctttttatgaaggctttcatgaattttagtatgtaatacgcactgacgacacatgatgcttggatgacagatgagaggggatggctgagtcctgtggctggcccgtgatgccaggtggcccatgtgcccagggcgcctgcagggctgctacagggacctggtcaggaggtgcacatggtgccctgccctcacccaccctctgtgtttccccttctttgaaaaggtagaagagaaaggaatattttaaacctttttggcttaaacagaattttagcatcagaactagctttctgggattggaggcaaaccatcaaggtggtccctctccagtctggacacgatgccagcaaggatgacgtcctgccacctcctggagttaccctggcctcctagggtccctttttctgatgaagtcttaattccctaaaagcgcctctttggacactgaggccctctctgcctttcctggcctccggcaacagtttttttacaaagattttttgcagtcgagtccatatgtccacccattgatttttaaagcttttgtgatattttagcattttgaaagactttcacagtgagagtagaaggtagatttggaatcatacattttagcaagtggacttgttgaaacaggaagcaagggccttcagtgtagcccattcttgatccagagctgttgcctgtgacagcggtttctctggatgtcaaaggcagctgcctggtgcccagcttgcttctcgactggtggcccctatgggtgggtgtgcgatggaaatgtgttcctgccggagtctgaggcaccagggtgtgctcaaaggctggccctggtggtggactggcacctgtgcagagtgccgtgtgcttgtggtgcgccatctgaagcaagagtccagcgttctgccgtgtctgtcccccaccatgccccctacaggcggtactgatggcgcttttttttttttttttctgtcaggaaaacaatgttggcctgtgggccgcccacaacatatccttccctcactacctgtgtgaccaaggttggcttctgttgaccttttaaaaaagaaaccctcaactcaaattgctataattagacacttgcttctgtcttgcctcctgtctgcagctgtgaatagtcatttgactgtgactgttgcccttagccagccagatgcgcctgtgaaccaaagcttcgtgcacatgtgttcccctaaaggttggggagcctcgctgtgtcttgctgttcccaggcaccaccacagcaggtgctgccatactcttgtggtctctgtgcgccccccccccccccacccgtctgccaagcatgggtatgaatcgtgcacacagccatgcttcaaggccggggcaggggagcctgtgctgatgccatccagggcactgggctgtgcctggaaggcgagccttgattgtctgaacacataaagcaaactgtccagaag

SEQ ID NO: 115 - DNA, 3675 bp, Homo sapiens
aggctcctgatggaaagggaaggcccctagtcctggcaggatctgccggccccaacccgcatcctttctgcgcaggaaccatggcgcttccccgactctggagctgtccaggtgctgcctggtgatccgcacgcgacgcggcgacgggggcgcgggcgggcaccccgggggctgtccatgccccggatgcggccgcgccccctccccctccagccgggtacccccgcggctgggcggcgttcagggccgcgggcccgtccgggtgccccgtcgggggcgacatcccggcggccgcgctgaggccaccatgtgacacggcgccgcatcgttgtgcgaccaagcagcggcgccctggtgcctctcgtccatgctcctgggccccagccccgcgcaggccaaggatgaggccgaggcccgaaggtagggggctccgggcgggagtcgcgctgtcccccgcgctactgctgctgctgctgctgccgccgccgccgacgctgctggggcgcctgtgggcagcgggcacaccctcgccgtcggcgcccggagctcggcaggacggcgcgctgggagccggccgcgtcaaacgcggctgggtgtggaaccagttcttcgtggtagaggagtacacgggcacggagcccctgtatgtgggcaagatccactccgactcagacgagggtgacggggccatcaagtacaccatctcaggcgagggtgctgggaccatcttcctgatcgacgagctgacaggcgacattcatgccatggagcgcctggaccgcgagcagaaaaccttctacacgctgcgggcccaggctcgggatcgcgccaccaaccgcctactggagcccgagtcggagttcatcatcaaggtgcaggacatcaatgacagtgagccccgcttcctgcacggcccctatattggcagcgtggccgagctctcacctacaggcacgtcggtgatgcaggtgatggcctcggatgcggatgaccccacgtacggcagcagcgctcggctggtgtacagcgtgctggacggcgagcaccacttcaccgtggaccccaagaccggcgtaatccggacggctgtgcctgaccttgaccgcgagagccaggagcgctacgaggtggtgatccaggccacagacatggcgggtcagctgggtggcctctcgggctccactaccgtcaccatcgtagtcaccgacgtcaatgacaacccgccccgtttcccgcagaagatgtaccagttcagcatccaggagtcagcccccattggaacggctgtgggacgtgtgaaggctgaggactcagacgtgggagagaacacagacatgacttaccaccttaaggacgagagcagcagcggcggcgatgtgttcaaggtcaccacagacagcgacactcaggaggccatcatcgtagtgcagaagcgcctggacttcgaatcccagcccgtgcacaccgtgatcctggaggccctcaacaagttcgtggacccccgcttcgccgacctgggcacgttccgcgaccaggcgatcgtgcgcgtggccgtgaccgacgtggacgagccccccgagttccggccgccctccggcctcctggaggtgcaggaggacgcgcaggtgggctccctggtcggcgtggtgacggcgcgggaccccgacgccgccaaccggcccgtccggtacgccattgaccgcgaatcagatttggaccagatcttcgatatcgatgcggacacaggcgccatcgtgactggcaaggggctggaccgcgagacggccggctggcacaacatcacagtgctggccatggaggcggacaatcatgcacagctatcccgggcatccctaaggatccgaatcctggatgtgaacgacaatcccccagaactggccacaccctacgaggcagctgtatgcgaggatgccaagccaggccagctcatccagaccatcagcgtggtggacagagacgagccccaaggcgggcaccgcttctatttccgcctggtgcctgaagctcccagcaaccctcatttctctctgcttgacatccaagacaacaccgctgcagtgcacacgcagcacgtgggcttcaaccggcaggagcaggacgtgttcttcctgcccatcctggtggtagacagtgggccgcccacactgagcagcacaggcacgctcaccatccgcatctgtggctgcgacagctccggcaccatccagtcctgcaacaccacggcctttgtcatggccgcctccctcagccccggcgccctcatcgccctcttggtctgcgttctcatcctggttgtgctggtgctgctgatcctcaccctcaggcgccaccacaagagccacctgagctcggacgaggatgaagacatgcgggacaacgtcatcaaatacaacgacgaaggcggcggcgagcaggacaccgaagcctacgacatgtcggcgctgcggagcctctacgacttcggcgagctcaagggcggcgacgggggcggcagcgcgggcgggggagcgggcgggggctcgggcgggggcgcgggcagccccccgcaggcccacctgccctccgagcgccactcgctgccgcaggggccgccgagccccgagccagacttctcagtgttcagggacttcatcagccgcaaggtggcactggcggacggggacctgtcggtgccgccctacgacgccttccagacctacgccttcgagggcgcggactcgccggccgcctcgctcagctccctgcacagcggctcgtcgggctccgagcaggacttcgcctatctcagcagctggggtccgcgcttccggcccctggccgcgctctacgccggccaccgcggggacgacgaggcccaggcctcctagcccctcgccctgccgtcggggcgcggctgctcacccgcccagcacacgccggggccccaggacaacgcgtttcccccgcggaccccctttcctgccctcccccaaccctcccttggcggctggacggaggggggacttgctaggagcggactcttccattcctcctcctctaggggtgcagctttggagcccagaggtgcgggattctgaccaacggcattaaaactgaggcgagaccgggcacggtgtggctctggggttagaatgggagatgggggtggcgttgcagagtcgggaaggggcgggtcactcaatcctggcctgggggagaatgctggagggagcacgccgctgagatgcccccaccccaggtttcccccatcagagttaagaggaaagaaggctgttcacttactaagcacctactgtgtgctgggacgctgtacagagaccagctcagtcgtcagagaaaccatgaggtggtgtcctgcacggaatagaaggggaaaggaccccagagaagtggctgtgacccgtccaagggcacctggccagtgaatggcagagcctctggcactgaccagctgcctggcctcgggcaagtcacttcacttctctggtcctcagtttcctcatctgtcaaatggggttaataacagaacctacctcgaagagttgtgaggctaaaaagggttcatatgtgtcaagtggttaggacagtgcctggcacatagtaggtgttcaataaatgctagcctttgttactattaaaaaaaaaaaaaaaaaa

SEQ ID NO: 116 - DNA, 3286 bp, Homo sapiens
ctgaggcggcgacgagtggtaggagtcttctttcccctccttcccctttcccttcccttcccgggagaggctgggacccggcaccagggcagtactgtggccgctgcggcctcagctccgactgggtcaggttgcggagactccaggccgcttccagggcgagtactcctgattgtgacatcacattcatcccctgggcgatggagcttgtcactgggaaggaatactcagtcggagaatagccaacaagatgggttactgggagaatctcttcagtggcactgagtggaggcatcagggggttggagccttgtgaacagggaacctgccccccaacacttggaaggacctgggtttcagtgatgagacatggggtatgatgtaacccgtttccagggggatgttgacgaagatcttatctgccctatttgcagtggagtcttggaggagccagtacaggcacctcattgtgaacatgctttctgcaacgcctgcatcacccagtggttctctcagcaacagacatgtccagtggaccgtagtgttgtgacggtcgcccatctgcgcccagtacctcggatcatgcggaacatgttgtcaaagctgcagattgcctgtgacaacgctgtgttcggctgtagtgccgttgtccggcttgacaacctcatgtctcacctcagcgactgtgagcacaacccgaagcggcctgtgacctgtgaacagggctgtggcctggagatgcccaaagatgagctgcccaaccataactgcattaagcacctgcgctcagtggtacagcagcagcagacacgcatcgcagagctggagaagacgtcagctgaacacaaacaccagctggcggagcagaagcgagacatccagctgctaaaggcatacatgcgtgcaatccgcagtgtcaaccccaaccttcagaacctggaggagacaattgaatacaacgagatcctagagtgggtgaactcccttcagccagcaagagtgacccgctggggagggatgatctcgactcctgatgctgtgctccaggctgtaatcaagcgctccctggtggagagtggctgtcctgcttctattgtcaacgagctgattgaaaatgcccacgagcgtagctggccccagggtctggccacactagagactagacagatgaaccgacgctactatgagaactacgtggccaagcgcatccctggcaagcaggctgttgtcgtgatggcctgtgagaaccagcacatgggggatgacatggtgcaagagccaggccttgtcatgatatttgcgcatggcgtggaagagatataagagaactcgactggctatcaggaagagatggaaatcagaaaatcccatcactccagcagctgggacctgagtcctacccaccattcttaatactgtggcttatacctgagccacacatctccctgcccttctggcactgaagggccttggggtagtttgctcagcctttcaggtgggaaacccagatttcctccctttgccatattcccctaaaatgtctataaattatcagtctgggtgggaaagcccccacctccatccattttcctgcttagggtccctggttccagttattttcagaaagcacaaagagattcaatttccctggaggatcaggacagaggaaggaatctctaatcgtccctctcctccaaaaccagggaatcagagcagtcaggcctgttgactctaagcagcagacatcctgaagaaatggtaagggtggagccaaatctctagaaataagtagtgaggccgttaattggccatcactgatggcccttagggaaagactggacctctgtgccaagcagtatccctgttcagcccaccttaaaggtgtaggcacccactgggtctaccagtatgcaggttgggatactgaaaatttccagatgagctcttctttcctacaagttttcataattagggaatgccagggtttagggtaggggttaatctgttgggggttgatgtgtttagcaagaagctactcctagcttttgctaaaatatggttggcactgcctcttgtggcacaggccataattgttccatagacccctctctagccctgtgactgtagttagttactttgataattttctttggccattgtttgtttatatttcacaaactccacctactgcccccccccctcttttttttaagaatggcctgatcatggctatctcagccacattgttggcaatttaatttatttacttcctttttttttttttaagaaaggaaaaaagaaaaaaaaatcaaacttgaaacttttcttttgatgttcctattgtgggggttctggatagggtgggacagggatgggggtgtgttttatattttttccttttcagcacaacctttggctttaatataggaagagccaagggagtcctcggctgaacttacgatatctgccccaaacctctgtaaccccaactgaaatgaggagcttcctctcttcctgtgaaggatatgacagtccagcatcgatgcctgtgccctctggaaaaatttcctcctagcccttccagggccttatcataaaactctggatttagagtattcattttgaaggcaactcccccttccccaagtttccttggagctgtatagctgggttctaagcttcaccatgcaaatcagaaattttatctctaagtacaggctgtgccgtgtctcacccacacccccctggggacttcagttccatttcaggttacctggggtataccttgatccctagagtgactggcagagtaagagaaggggagagataataggtgtgattattttaatatggaggtgggagtgtggttggagatagaaaggctcctccccaccatgtaatggcttcctctcagaattttattccaggctagcttgctgcaggtctgggtagttggatcatggctccactgggattggggtggaaagcttgaggggagtagggttccagctctgggacattgtgctcaggaatttgaaaacgctgctatacttactctggttactacatttcttccactcccctttcccctacctgccttaaccaaggctcatactgtcctgtccttaccctcagatggagccaggaagctcagtgaaaggcttccctaccctttgcactagtgtctctgcaggttgctggttgtgttgtatgtgctgttccatggtgttgactgcactaataataaaccttttactcaactctctaaaaaaaaaaaaaaaaaaaa

SEQ ID NO: 117 - DNA, 888 bp, Homo sapiens
gcatggcggccaccaggtgcctgcgctggggcctgagccgagccggagtctggctgctcccaccgcccgcacggtgcccacgccgggcgctgcacaagcagaaagacggcactgagttcaagagcatctacagcctggacaagctctaccccgaatctcagggctcggacaccgcctggagggtcccgaatggtgcaaagcaagccgacagtgacatccctctagatcgcttgacaatatcttattgtcggagtagtggtcctggggggcagaatgtgaacaaagtgaattccaaggcagaagtcaggttccatttggcaactgccgagtggatcgcggagcccgtgcggcagaagatagccatcacgcataaaaacaagatcaacaggttaggagagttgatccttacctctgagagcagccgctatcagttccggaatctggcagattgcctgcagaaaattcgagacatgatcactgaggccagccagacaccgaaggagccaacaaaagaagatgttaaacttcatagaatcaggatagaaaacatgaatcgggaaaggctgagacaaaagagaattcattctgctgtaaagacaagcaggagggtcgacatggactgaaatcaccctctgcagctgggagggctcttctgggcgtccgggcagctgcagctgagaggactttcacaccataaggagatttctgtttttctttttggctgttaatgcttgtctataacattggagccatcacaagaatgttcatttggaatgaaggctgcaggcactggttgcagacgtctttataggcagtcaccatgttgtcaaaccttaataatgcacctcatgtattagtcacaataaaaatcagaactcaaaaaaaaaa

SEQ ID NO: 118 - DNA, 1679 bp, Homo sapiens
ggatcttcaaaccgtgggagtggtgcggcggctagagtccctggactcctcaacctagggagctactcgcgagatgcctacgacttgtaacgggctgcctggtaaaatgagtctatggaaacggttgccagggccggctaacagcggctcccggaagtcctttgatgctttgttaacagtgaagctactggaccaatgaggtgcttcttccggttttgtccgcgctcgcctaattcttctttatcaaggttgcctttgaccccggaaaagagatcttccgggttcctctctccccaagatggctgctgaggacgagttacagctgccgcggctccccgagctgttcgaaactggtagacagttactggacgaagtagaagtggcgactgaacccgccggttcccggatagtccaggagaaggtgttcaagggcttggacctccttgagaaggctgccgaaatgttatcgcagctcgacttgttcagccgaaatgaagatttggaagagattgcttccaccgacctgaagtaccttttggtgccagcgtttcaaggagccctcaccatgaaacaagtcaaccccagcaagcgtctagatcatttgcagcgggctcgagaacactttataaactacttaactcagtgccattgctatcatgtggcagagtttgagctgcccaaaaccatgaacaactctgctgaaaatcacactgccaattcctccatggcttatcctagtctcgttgctatggcatctcaaagacaggctaaaatacagagatacaagcagaagaaggagttggagcataggttgtctgcaatgaaatctgctgtggaaagtggtcaagcagatgatgagcgtgttcgtgaatattatcttcttcaccttcagaggtggattgatatcagcttagaagagattgagagcattgaccaggaaataaagatcctgagagaaagagactcttcaagagaggcatcaacttctaactcatctcgccaggagaggcctccagtgaaacccttcattctcactcggaacatggctcaagccaaagtatttggagctggttatccaagtctgccaactatgacggtgagtgactggtatgagcaacatcggaaatatggagcattaccggatcagggaatagccaaggcagcaccagaggaattcagaaaagcagctcagcaacaggaagaacaagaagaaaaggaggaagaggatgatgaacaaacactccacagagcccgggagtgggatgactggaaggacacccatcctaggggctatgggaaccgacagaacatgggctgatcttcccacaacaccacaggactgcagggtgcacaactcccctgccaaggaaaaccatgcagtcctcccctccctggtctcctgcttcagctctgtacaacgagggcaaagatgctaaatcttgctttgcattcagtaaagtgtcaagtgattaagtgtgtatttgtaccctagatgatatgaaccagcagtcttgttttggcatcatcctcatcatgttgtattccagcttcttaagtggaaggaaaagagtgctgagaaatggctctgtataatctatggctatccgaattctctgaaaaaataataaaagtcccctctattatatgagcctgtacagaaaaaaaaaaaaaaaaaaaaa

SEQ ID NO: 119 - DNA, 877 bp, Homo sapiens
caagaggcagcgctctcgggacgtctccaccatggcctgggctctgctgctcctcaccctcctcactcaggacacagggtcctgggcccagtctgccctgactcagcctgcctccgtgtctgggtctcctggacagtcgatcaccatctcctgcactggaaccaacaatgatgttgggagttataaccttgtctcctggtaccagcagcacccaggcaaagcccccaaaatcatgatttatgaggtcagtaagcggccctcaggggtttctaatcgcttctctggctccaagtctggcaacacggcctccctgacaatctctgggctccaggctgaggacgaggctgattattactgctgctcatatgcaggtagttacactgtggttttcggcggagggaccaaactgaccgtcctaggtcagcccaaggctgccccctcggtcactctgttcccgccctcctctgaggagcttcaagccaacaaggccacactggtgtgtctcataagtgacttctacccgggagccgtgacagtggcctggaaggcagatagcagccccgtcaaggcgggagtggagaccaccacaccctccaaacaaagcaacaacaagtacgcggccagcagctatctgagcctgacgcctgagcagtggaagtcccacagaagctacagctgccaggtcacgcatgaagggagcaccgtggagaagacagtggcccctacagaatgttcataggttctaaaccctcaccccccccacgggagactagagctgcaggatcccaggggaggggtctctcctcccaccccaaggcatcaagcccttctccctgcactcaataaaccctcaataaatattctcattgtcaatcac

SEQ ID NO: 120 - DNA, 5875 bp, Homo sapiens
ggagccgcggcggcgggcagcgcgggacccagtactatggctgtgtactgctatgcgctcaatagcctggtgatcatgaatagcgccaacgagatgaagagcggcggcggcccggggcccagtggcagcgagacgcccccgcccccgaggagggcagtgctgagccccggcagcgttttcagccccgggagaggcgcctctttcctcttccccccagccgagtcgctgtcccccgaggagccccggagccccgggggctggcggagcggccggcgcaggctgaatagtagcagcggcagtggcagcggcagcagcggcagtagcgtgagcagcccaagttgggctggtcgcctgcgaggggaccggcagcaggtggtggcagccggtaccctctccccgccagggccggaggaggccaagaggaagctgcggatcttgcagcgcgagttgcagaacgtgcaggtgaaccagaaagtgggcatgtttgaggcgcacatccaggcacagagctccgccattcaagcgccccgcagcccgcgtttgggcagggctcgctcgccctccccgtgccccttccgcagcagcagtcagccccctggaagggtcctggttcagggcgcccggagcgaggaacggaggacaaagtcctggggggagcaatgtccagagacttcaggaaccgactccgggaggaaaggagggcccagcctatgctcctcgcaggtgaagaaaggaatgccacctcttcccggccgggctgcccctacaggatcagaggctcagggtccatccgcttttgtaaggatggagaagggtatccctgccagtccccgctgtggctcacccacagctatggaaattgacaaaaggggctctcctaccccgggaactcggagctgcctagctccctcattggggctgttcggagctagcttaacgatggccacggaagtggcagcgagagttacatccactgggccacaccgtccacaggatcttgccctcactgagccgtctgggagagcccgtgagcttgaggacctgcagcccccagaggccctggtggagaggcaggggcagtttctgggcagtgagacaagcccagccccagaaaggggcgggccccgcgatggagaaccccctgggaagatggggaaaggatatctgccctgtggcatgccgggctctggggagcctgaagtgggcaaaaggccagaggagacgactgtgagcgtgcaaagcgcagagtcctctgattccctgagctggtccaggctgcccagggccctggcctccgtaggccctgaggaggcccgaagtggggcccccgtgggcggggggcgttggcagctctccgacagagtggagggagggtccccaacgctgggcttgcttgggggcagcccctcagcacagccggggaccgggaatgtggaggcgggaattccttctggcagaatgctggagcctttgccctgttgggacgctgcgaaagatctgaaagaacctcagtgccctcctggggacagggtgggtgtgcagcctgggaactccagggtttggcagggcaccatggagaaagccggtttggcttggacgcgtggcacaggggtgcaatcagaggggacttgggaaagccagcggcaggacagtgatgccctcccaagtccggagctgctaccccaagatcaggacaagcctttcctgaggaaggcctgcagccccagcaacatacctgctgtcatcattacagacatgggcacccaggaggatggggccttggaggagacgcagggaagccctcggggcaacctgcccctgaggaaactgtcctcttcctcggcctcctccacgggcttctcctcatcctacgaagactcagaggaggacatctccagtgaccctgagcgcaccctggaccccaactcagccttcctgcataccctggaccagcagaaacctagagtgagcaaatcatggaggaagataaaaaacatggtgcactggtctcccttcgtcatgtccttcaagaagaagtacccctggatccagctggcaggacacgcagggagtttcaaggcagctgccaatggcaggatcctgaagaagcactgtgagtcagagcagcgctgcctggaccggctgatggtggatgtgctgaggcccttcgtacctgcctaccatggggatgtggtgaaggacggggagcgctacaaccagatggacgacctgctggccgacttcgactcgccctgtgtgatggactgcaagatgggaatcaggacctacctggaggaggagctcacgaaggcccggaagaagcccagcctgcggaaggacatgtaccagaagatgatcgaggtggaccccgaggcccccaccgaggaggaaaaagcacagcgggctgtgaccaagccacggtacatgcagtggcgggagaccatcagctccacggccaccctggggttcaggatcgagggaatcaagaaagaagacggcaccgtgaaccgggacttcaagaagaccaaaacgagggagcaggtcaccgaggccttcagagagttcactaaaggaaaccataacatcctgatcgcctatcgggaccggctgaaggccattcgaaccactctagaagtttctcccttcttcaagtgccacgaggtcattggcagctccctcctcttcatccacgacaagaaggaacaggccaaagtgtggatgatcgactttgggaaaaccacgcccctgcctgagggccagaccctgcagcatgacgtcccctggcaggaggggaaccgggaggatggctacctctcggggctcaataacctcgtcgacatcctgaccgagatgtcccaggatgccccactcgcctgagctgcccacgccctccctggcccccgcctgggcctcctttcctcctcctgtgcttcctttctcgttcctaacttttccttcacttacacctgactgaccctcctgaactgcactacaagacactttgtagaagaggagatgagagtttctagtcattttcctaacttcagggcttggaggtggtgtttgcactgctttttgtagagagggtcacctactagaagagaaatgcccagtcttagaggtgggtcaggtgtagagctggagggggtccctggctgctgaggggaccctaccagatgagccctgcctctgggagccccctaggaagcaccagcctggacctaccacctgcggaggcctgctgccccctggcggccagtgctgttagagtgctgccaagcacagccttatttctgccggggcctccccaccggagagcccagggggccggccgggttcctggtccctggctgggagcagggctttctggtagttggggcacaaaaccatcggggaaccacatgttgactgtgagcaaagtgtcttccgattagcagcctcagggatgccctggtggcctctccagggctgctcaggcaaggccccccacccatctggtatggaaacctgccggctccaggccagacccaggagccaagagaaggctgaagccagcttggctgtgttctctgatctaggccttcccagaggaggcgagcagaagctgtgccacttggaattgcaacccatgagttcagaaggcacactctgccatgctgagctccaagggtgctaccaggggaagatgggatctatagagtctctgggccctggccccagggaggagcacatttttcttgaccctcacctacctggtgctagttggtcaaccctgcctgcatacatgggctcctgtcatggggcccagagtcccttgcagatatagaaataggggaggagctcaggtctgcgccaggcaggaagaaggcaggcttctggcttccagaggtgccgcggtggcctcctggcatcatttgttattgcctctgaaacaagccttactgcctggagggcttagattcctgcttctccaatgtagtgtgggtatcttgtagggtatgtggtggatgccagggcgtgctccaggcacctcttcctgaagtctctgcatttggagattcgtggagaacctatttaagcccaattttaactgaaagccagtgagtctgatatggaagggaatgtaaaatttgcctgacttcttaagaacaaaacccccagctctgtgccccatgctccttggggcttgccacccactcctttgctgtcagaggtacaggagctgggagagtccaggagctagggacacagagggagactatggaccaaggtgtgtgtgtctggaggaaccactgcccaccccaccaccccggggtctctggggaactgtcaacctgcccacgggacatgtacatttccccttttgtgctggaagtgtgagtgacacttgctgggggtggagggtgggacacatgaggatgtataagtacagattttaaaaaaggaaatcaacttacacttcctggctcttgtttaaaacagtggtgagctcctgtgtgggccgacttgctaaaggtcacacacgcgcccggtggagcacgagagacctcgtggcagcatgtgatctggaaggcaggcaggacgggggcgttggggagccaaagtcaactctgggcctctggagctatagtgacttttgggctagaagggaccctggtggtctgtgcttcagccatttgcagggcaggggcatcattaattcagacgtaaagattctatgaatatggactggccaaaagttatccttactccatctgtgaaagaagtttgctaaagcaaatcatgatatgaacaaaaattacaggggacctgtttaagagaacaaaatgttccaagcactttaggcagacaccagctgtttgcaaacaatgtgctaatatgcaaatgatgtgcttattaaaggaggcccatggggcctcttattggcaatacttggctgtgggttacattaaatatgtgaacatagtatgaagtagcatcattttagggttattctgttacttagggtttttgttttctgttttttttttctctttttttgtatttaccgtgctagttctcttctacacctactctgtctctcaagccattttgccactcgcttccctgccatctggcccttccctttgtctcagtgggatagatggattgtgaaatggaatctcccagaacccctgccctggcagcctggaagaccgtgcctgcccagccctcgtcaccacagggactccttgggtcctggcagtgcatgtgccagcaggcaggacaaactctgtgtacctgtgcccaggtgaatgggcgcagggtcctcttgccctgtcctgcggggggccccacgagttcctggcattcagcactgcttagcattctcggaaggtttcttcaactgcttgcttttcccaggcttgcctttagtgtcatgtaagacatttttaagttatatttattttgttgggttttaaaattgcacagaacactaagaccgaaaggctggactcttgtttctccttgaaagctttgcctttgttttgaacttcctttcccacttggtagaaagagcccagaagcagccctggccctgtaagatggactctttcatccttcagttgtatttagctttgagtttctctgcatctgtccaccccatgtgtatataacccagcccctggctctggggtggtcacctcgtcagtgccttttgttctggaggagaggaccccccccgcctgccgagaggctctcttcctgttctgcacccctctccccatgggaccttggagaaaactgaactgttacaaacccctgcacagtgcctgtcaaacagatgcaaaccttcctgaataaagccttggagaccaaaaaaaaaaaaaaaaaa

SEQ ID NO: 121 - DNA, 4737 bp, Homo sapiens
ctgaggccggcgctgcaggcagcggcggctgcgcggtgaacgaggcggcctgcgcggcggagtgctgagtcccgatccccggctctgtccggcccacggatcctcaagcccgggccccgggcccggccccagcctcagccctgagcgtctcggggcggatggcgcggggcggcgggggcgggcggtgctgagccctgcgcgggccatggcctcggcctgcggggcgccgggcccggggggcgccctgggcagccaggccccctcctggtaccaccgcgacctgagccgggcggccgcggaggagctgctggcccgggcgggccgcgatggcagcttcctggtccgagacagcgagagcgtggcgggggccttcgcgctctgcgtcctgtatcagaagcatgtgcacacgtatcgcattctgcctgatggagaagatttcttggctgtgcagacctcgcagggtgtgcctgtgcgccgcttccagaccctgggtgagctcatcggcctgtacgcccagcccaaccagggccttgtgtgcgccctgcttcttcctgtagagggtgagcgagagccggacccaccggatgaccgggatgcctcagatggggaggatgagaagcccccgctgcccccgcgctctggctccaccagcatttctgcccccactgggcccagcagtcccctgccagctcctgagactcccacagctccagctgctgagagtgctcccaatgggctgagcaccgtctcgcacgactacctgaaaggcagctatgggctggacctggaagctgtgaggggtggagccagccacctgccccacctcacccgtaccctcgctacctcatgccggaggctgcacagtgaggtggacaaggtcctgtcaggcctggagatcctgtccaaggtgtttgaccagcagagctcgcccatggtgacccgccttttgcagcagcagaacctgccacagacaggggagcaggaactagagagcctggtgctgaagctgtcagtgctaaaggacttcctgtcaggcatccagaagaaggccctgaaggccctacaggacatgagctccacagcacccccagctccgcagccatccacacgtaaggccaagaccatccccgtgcaggcctttgaggtgaagctagatgtgaccctgggtgacctgaccaagattgggaagtcacagaagttcacgctgagcgtggatgtggagggtgggcggctggtgctgctgcggagacagcgggactcccaggaggactggaccaccttcacgcacgaccgcatccgccagctcattaagtcccagcgtgtccagaacaagctgggtgttgtgtttgagaaggagaaggaccggactcagcgcaaggacttcatctttgtcagtgcccggaagcgggaggccttctgccagctgttgcagctcatgaagaacaagcactccaagcaggacgagcccgacatgatctcagtcttcataggcacctggaacatgggaagtgtaccacctccaaaaaacgtgacatcctggttcacatcgaagggtctggggaagaccctggacgaggtcacagtgaccataccccatgacatctatgtctttgggacccaggagaactcagtgggcgaccgcgagtggctggacctactgcgcgggggcctcaaggagcttacggatctggattaccgcccgattgccatgcaatcactgtggaatatcaaggtggcagtgctggtcaagccagagcacgagaaccgtatcagccatgtcagtacgtccagtgtgaagactggcatcgccaacaccctggggaacaagggggctgtgggcgtctccttcatgtttaatggcacctcatttggctttgtgaattgtcacctcacctcgggaaatgagaagacggctcggaggaaccaaaactacttggacatcctgcggctgctctcgctgggcgaccggcagctcaatgcctttgacatctctctgcgtttcacacacctcttctggtttggggacctcaactaccgcctggacatggatatccaggagatcctgaactacatcagcaggaaagagtttgagcccctcctcagggtggaccagctcaacctggagcgggagaagcacaaggtcttccttcgattcagtgaggaggagatctccttcccacccacctaccgctatgagcggggttcccgggacacatatgcctggcacaagcagaagccaactggggtccggaccaatgtgccctcatggtgtgaccggattctgtggaaatcctaccctgaaactcacatcatctgcaattcttatggttgcactgatgacatcgtcaccagcgaccattcccccgtgtttgggacatttgaggttggagttacctcccagttcatctccaagaaagggctctcaaagacttcagaccaggcctacattgagtttgagagcatcgaggccattgtgaagacagccagccgcaccaagttcttcatcgagttctactctacctgcctggaggaatacaagaagagctttgagaatgatgcccagagcagtgacaacatcaacttcctcaaagtgcagtggtcttcacgccagctgcccacgctcaaaccaattctggctgatatcgagtacctgcaggaccagcacctcctgctcacagtcaagtccatggatggctatgaatcctatggggagtgtgtggttgcactcaaatccatgatcggcagcacggcccaacagttcctgaccttcctatcccaccgtggcgaggagacaggcaatatcagaggctccatgaaggtgcgggtgcccacggagcgcctgggcacccgtgagcggctctacgagtggatcagcattgataaggatgaggcaggagcaaagagcaaagccccctctgtgtcccgagggagccaggagcccaggtcagggagccgcaagccagccttcacagaggcctcctgcccgctctccaggttatttgaagaaccagagaaaccgccaccaacggggaggcccccagccccaccccgagcagctccccgggaggagcccttgacccccaggttgaagccagagggagctcctgaaccagaaggggtggcggcccccccacccaagaacagcttcaataaccctgcctactacgtccttgaaggggtcccgcaccagctgctgcccccggagccaccctcgcctgccagggcccctgtcccatctgccaccaagaacaaagtggccattacagtgcctgctccacagcttgggcaccaccggcaccctcgtgtgggagaggggagttcttcagatgaggagtctggaggcacactgccccctccagactttccacctccaccactgccggactcagccatcttcctgccccccagcctggatcctttaccagggccagtggtccggggccgtggtggggctgaggcccgtggcccaccacctcccaaggcccatccaaggcctccactgcccccaggcccctcaccagccagcactttcctgggggaagtgggcagtggggatgaccggtcctgctcggtgctgcagatggccaagacgctgagcgaggtggactatgcccctgctgggcctgcacgctcagcgctcctcccaggccccctggagctgcagcccccccggggactgccctcggactatggccggcccctcagcttccctccaccccgcatccgggagagcatccaggaagacctggcagaggaggctccgtgcctgcagggcgggcgggccagcgggctgggcgaggcaggcatgagtgcctggctgcgggccatcggcttggagcgctatgaggagggcctggtgcataatggctgggacgacctggagtttctcagtgacatcaccgaggaggacttggaggaggctggggtgcaggacccggctcacaagcgcctccttctggacaccctgcagctcagcaagtgatagcggaggcaccacgaagctgtgaactcagagcccctccctgctaccaaggcccagctatggccccagggttgaaaagttatgagggtcagggcagtatctctctgcctatttattggggtgcctatttattggggatctgcattccccgctgcccaatcatttgcaatgccctaattagggcatcctgcccctcgccttttaggctcaggacggaaggtcagttgccatggttaccgaggaccctggttactctggtgctgtcctgttttactggaccccgcctcccagccccaggggtgcctgtgggggtccatttgggtacgtctgggcccccactttcaccagtttctgcggccttccaccgggcctgaaccacagcggaggagctccgctaagacctccccacccccgctgggggtgggggcgggtgtccgtccggaaatgaaggaatagcccgaggaccgggctggggtttatttaaactgttctgtgtgggtctggggagggagagcaccttaatattattggggttggttggggtggggcaggatctcagccataaagtgccagtttgcttagttctcactgtctcctggtctgtgctgccctgctctggggatgcacggcggcagggtgggggagggaggttcctcgcaggtctcagcccgggacagggtcttgcaagcagcctcctgggcagtcgtaagggttgcggcgtgatgtcttcaataaattaagttttatttggaaaa

SEQ ID NO: 122 - DNA, 5828 bp, Homo sapiens
cggcggcgcggtcggagggggccggcgcgcagagccagacgccgccgcttgttttggttggggctctcggcaactctccgaggaggaggaggaggagggaggaggggagaagtaactgcagcggcagcgccctcccgaggaacaggcgtcttccccgaacccttcccaaacctcccccatcccctctcgcccttgtcccctcccctcctccccagccgcctggagcgaggggcagggatgagtctgtccctccggccggtccccagctgcagtggctgcccggtatcgtttcgcatggaaaagccactttctccacccgccgagatgggcccggatggggctgcagaggacgcgcccgcgggcggcggcagcagcagcagcagcagcagcagcaacagcaacagccgcagcgccgcggtctctgcgactgagctggtatttgggcggctggtggcggctgggacggttggggggtgggaggaggcgaaggaggagggagaaccccgtgcaacgttgggacttggcaacccgcctccccctgcccaaggatatttaatttgcctcgggaatcgctgcttccagaggggaactcaggagggaaggcgcgcgcgcgcgcgcgctcctggaggggcaccgcagggacccccgactgtcgcctccctgtgccggactccagccggggcgacgagagatgcatcttcgctccttcctggtggcggcggcggctgagaggagacttggctctcggaggatcggggctgccctcaccccggacgcactgcctccccgccggcgtgaagcgcccgaaaactccggtcgggctctctcctgggctcagcagctgcgtcctccttcagctgcccctccccggcgcggggggcggcgtggatttcagagtcggggtttctgctgcctccagccctgtttgcatgtgccgggccgcggcgaggagcctccgccccccacccggttgtttttcggagcctccctctgctcagcgttggtggtggcggtggcagcatggcgagccctccggagagcgatggcttctcggacgtgcgcaaggtgggctacctgcgcaaacccaagagcatgcacaaacgcttcttcgtactgcgcgcggccagcgaggctgggggcccggcgcgcctcgagtactacgagaacgagaagaagtggcggcacaagtcgagcgcccccaaacgctcgatcccccttgagagctgcttcaacatcaacaagcgggctgactccaagaacaagcacctggtggctctctacacccgggacgagcactttgccatcgcggcggacagcgaggccgagcaagacagctggtaccaggctctcctacagctgcacaaccgtgctaagggccaccacgacggagctgcggccctcggggcgggaggtggtgggggcagctgcagcggcagctccggccttggtgaggctggggaggacttgagctacggtgacgtgcccccaggacccgcattcaaagaggtctggcaagtgatcctgaagcccaagggcctgggtcagacaaagaacctgattggtatctaccgcctttgcctgaccagcaagaccatcagcttcgtgaagctgaactcggaggcagcggccgtggtgctgcagctgatgaacatcaggcgctgtggccactcggaaaacttcttcttcatcgaggtgggccgttctgccgtgacggggcccggggagttctggatgcaggtggatgactctgtggtggcccagaacatgcacgagaccatcctggaggccatgcgggccatgagtgatgagttccgccctcgcagcaagagccagtcctcgtccaactgctctaaccccatcagcgtccccctgcgccggcaccatctcaacaatcccccgcccagccaggtggggctgacccgccgatcacgcactgagagcatcaccgccacctccccggccagcatggtgggcgggaagccaggctccttccgtgtccgcgcctccagtgacggcgaaggcaccatgtcccgcccagcctcggtggacggcagccctgtgagtcccagcaccaacagaacccacgcccaccggcatcggggcagcgcccggctgcaccccccgctcaaccacagccgctccatccccatgccggcttcccgctgctcgccttcggccaccagcccggtcagtctgtcgtccagtagcaccagtggccatggctccacctcggattgtctcttcccacggcgatctagtgcttcggtgtctggttcccccagcgatggcggtttcatctcctcggatgagtatggctccagtccctgcgatttccggagttccttccgcagtgtcactccggattccctgggccacaccccaccagcccgcggtgaggaggagctaagcaactatatctgcatgggtggcaaggggccctccaccctgaccgcccccaacggtcactacattttgtctcggggtggcaatggccaccgctgcaccccaggaacaggcttgggcacgagtccagccttggctggggatgaagcagccagtgctgcagatctggataatcggttccgaaagagaactcactcggcaggcacatcccctaccattacccaccagaagaccccgtcccagtcctcagtggcttccattgaggagtacacagagatgatgcctgcctacccaccaggaggtggcagtggaggccgactgccgggacacaggcactccgccttcgtgcccacccgctcctacccagaggagggtctggaaatgcaccccttggagcgtcggggggggcaccaccgcccagacagctccaccctccacacggatgatggctacatgcccatgtccccaggggtggccccagtgcccagtggccgaaagggcagtggagactatatgcccatgagccccaagagcgtatctgccccacagcagatcatcaatcccatcagacgccatccccagagagtggaccccaatggctacatgatgatgtcccccagcggtggctgctctcctgacattggaggtggccccagcagcagcagcagcagcagcaacgccgtcccttccgggaccagctatggaaagctgtggacaaacggggtagggggccaccactctcatgtcttgcctcaccccaaacccccagtggagagcagcggtggtaagctcttaccttgcacaggtgactacatgaacatgtcaccagtgggggactccaacaccagcagcccctccgactgctactacggccctgaggacccccagcacaagccagtcctctcctactactcattgccaagatcctttaagcacacccagcgccccggggagccggaggagggtgcccggcatcagcacctccgcctttccactagctctggtcgccttctctatgctgcaacagcagatgattcttcctcttccaccagcagcgacagcctgggtgggggatactgcggggctaggctggagcccagccttccacatccccaccatcaggttctgcagccccatctgcctcgaaaggtggacacagctgctcagaccaatagccgcctggcccggcccacgaggctgtccctgggggatcccaaggccagcaccttacctcgggcccgagagcagcagcagcagcagcagcccttgctgcaccctccagagcccaagagcccgggggaatatgtcaatattgaatttgggagtgatcagtctggctacttgtctggcccggtggctttccacagctcaccttctgtcaggtgtccatcccagctccagccagctcccagagaggaagagactggcactgaggagtacatgaagatggacctggggccgggccggagggcagcctggcaggagagcactggggtcgagatgggcagactgggccctgcacctcccggggctgctagcatttgcaggcctacccgggcagtgcccagcagccggggtgactacatgaccatgcagatgagttgtccccgtcagagctacgtggacacctcgccagctgcccctgtaagctatgctgacatgcgaacaggcattgctgcagaggaggtgagcctgcccagggccaccatggctgctgcctcctcatcctcagcagcctctgcttccccgactgggcctcaaggggcagcagagctggctgcccactcgtccctgctggggggcccacaaggacctgggggcatgagcgccttcacccgggtgaacctcagtcctaaccgcaaccagagtgccaaagtgatccgtgcagacccacaagggtgccggcggaggcatagctccgagactttctcctcaacacccagtgccacccgggtgggcaacacagtgccctttggagcgggggcagcagtagggggcggtggcggtagcagcagcagcagcgaggatgtgaaacgccacagctctgcttcctttgagaatgtgtggctgaggcctggggagcttgggggagcccccaaggagccagccaaactgtgtggggctgctgggggtttggagaatggtcttaactacatagacctggatttggtcaaggacttcaaacagtgccctcaggagtgcacccctgaaccgcagcctcccccacccccaccccctcatcaacccctgggcagcggtgagagcagctccacccgccgctcaagtgaggatttaagcgcctatgccagcatcagtttccagaagcagccagaggaccgtcagtagctcaactggacatcacagcagaatgaagacctaaatgacctcagcaaatcctcttctaactcatgggtacccagactctaaatatttcatgattcacaactaggacctcatatcttcctcatcagtagatggtacgatgcatccatttcagtttgtttactttatccaatcctcaggatttcattgactgaactgcacgttctatattgtgccaagcgaaaaaaaaaaatgcactgtgacaccagaataatgagtctgcataaacttcatcttcaaccttaaggacttagctggccacagtgagctgatgtgcccaccaccgtgtcatgagagaatgggtttactctcaatgcattttcaagatacatttcatctgctgctgaaactgtgtacgacaaagcatcattgtaaattatttcatacaaaactgttcacgttgggtggagagagtattaaatatttaacataggttttgatttatatgtgtaattttttaaatgaaaatgtaacttttcttacagcacatcttttttttggatgtgggatggaggtatacaatgttctgttgtaaagagtggagcaaatgcttaaaacaaggcttaaaagagtagaatagggtatgatccttgttttaagattgtaattcagaaaacataatataagaatcatagtgccatagatggttctcaattgtatagttatatttgctgatactatctcttgtcatataaacctgatgttgagctgagttccttataagaattaatcttaattttgtattttttcctgtaagacaataggccatgttaattaaactgaagaaggatatatttggctgggtgttttcaaatgtcagcttaaaattggtaattgaatggaagcaaaattataagaagaggaaattaaagtcttccattgcatgtattgtaaacagaaggagatgggtgattccttcaattcaaaagctctctttggaatgaacaatgtgggcgtttgtaaattctggaaatgtctttctattcataataaactagatactgttgatcttttaaaaaaaaaaaaaaaaaaaaaaaaaaaaa

SEQ ID NO: 123 - DNA, 952 bp, Homo sapiens
gcagctgcgctgcgactgctctggaaggagaggacggggcacaaaccctgaccatgaccccccacaggctgctgccaccgctgctgctgctgctagctctgctgctcgctgccagcccaggaggcgccttggcgcggtgcccaggctgcgggcaaggggtgcaggcgggttgtccagggggctgcgtggaggaggaggatggggggtcgccagccgagggctgcgcggaagctgagggctgtctcaggagggaggggcaggagtgcggggtctacacccctaactgcgccccaggactgcagtgccatccgcccaaggacgacgaggcgcctttgcgggcgctgctgctcggccgaggccgctgccttccggcccgcgcgcctgctgttgcagaggagaatcctaaggagagtaaaccccaagcaggcactgcccgcccacaggatgtgaaccgcagagaccaacagaggaatccaggcacctctaccacgccctcccagcccaattctgcgggtgtccaagacactgagatgggcccatgccgtagacatctggactcagtgctgcagcaactccagactgaggtctaccgaggggctcaaacactctacgtgcccaattgtgaccatcgaggcttctaccggaagcggcagtgccgctcctcccaggggcagcgccgaggtccctgctggtgtgtggatcggatgggcaagtccctgccagggtctccagatggcaatggaagctcctcctgccccactgggagtagcggctaaagctgggggatagaggggctgcagggccactggaaggaacatggagctgtcatcactcaacaaaaaaccgaggccctcaatccaccttcaggccccgccccatgggcccctcaccgctggttggaaagagtgttggtgttggctggggtgtcaataaagctgtgcttggggtcaaa

SEQ ID NO: 124 - DNA, 1082 bp, Homo sapiens
tgggagggtcagctccggtcctgggtcgggaggggtgggggccagaggattcagggccggaggttctggtgggggcccagtgggcgggacccgaggacggaggggccgggaggccgagaggggcggggtcgcggcggggcctgagggacggaggccgggatacttgggaaaggatccgccggccttgaactcccgcctccgccgcccctaggcctcatggcggtccgagcttcgttcgagaacaactgtgagatcggctgctttgccaagctcaccaacacctactgtctggtagcgatcggaggctcagagaacttctacagtgtgttcgagggcgagctctccgataccatccccgtggtgcacgcgtctatcgccggctgccgcatcatcgggcgcatgtgtgtgggagacagaagaaattctggcagatgtgctcaaggtggaagtcttcagacagacagtggccgaccaggtgctagtaggaagctactgtgtcttcagcaatcagggagggctggtgcatcccaagacttcaattgaagaccaggatgagctgtcctctcttcttcaagtcccccttgtggcggggactgtgaaccgaggcagtgaggtgattgctgctgggatggtggtgaatgactggtgtgccttctgtggcctggacacaaccagcacagagctgtcagtggtggagagtgtcttcaagctgaatgaagcccagcctagcaccattgccaccagcatgcgggattccctcattgacagcctcacctgagtcaccttccaagttgttccatgggctcctggctctggactgtggccaaccttctccacattccgcccaatctgtaccggatgctggcagggaggtggcagagagctcactgggactgaggggctgggcacccaacccttttccacctgtgcttatcgcctggatctatcattactgcaaaaacctgctctgttgtgctggctggcaggccctgtggctgctggctgagggttctgctgtcctgtgccaccccattaaagtgcagttccctccggaaaaaaaaaaaaaaaaaaaaaaaaaaaaa

SEQ ID NO: 125 - DNA, 1637 bp, Homo sapiens
ggcaagacgcctcttcagttgtctgctactcagaggaaggggcggttggtgcggcctccattgttcgtgttttaaggcgccatgaggggtgacagaggccgtggtcgtggtgggcgctttggttccagaggaggcccaggaggagggttcaggccctttgtaccacatatcccatttgacttctatttgtgtgaaatggcctttccccgggtcaagccagcacctgatgaaacttccttcagtgaggccttgctgaagaggaatcaggacctggctcccaattctgctgaacaggcatctatcctttctctggtgacaaaaataaacaatgtgattgataatctgattgtggctccagggacatttgaagtgcaaattgaagaagttcgacaggtgggatcctataaaaaggggacaatgactacaggacacaatgtggctgacctggtggtgatactcaagattctgccaacgttggaagctgttgctgccctggggaacaaagtcgtggaaagcctaagagcacaggatccttctgaagttttaaccatgctgaccaacgaaactggctttgaaatcagttcttctgatgctacagtgaagattctcattacaacagtgccacccaatcttcgaaaactggatccagaactccatttggatatcaaagtattgcagagtgccttagcagccatccgacatgcccgctggttcgaggaaaatgcttctcagtccacagttaaagttctcatcagactactgaaggacttgaggattcgttttcctggctttgagcccctcacaccctggatccttgacctactaggccattatgctgtgatgaacaaccccaccagacagcctttggccctaaacgttgcatacaggcgctgcttgcagattctggctgcaggactgttcctgccaggttcagtgggtatcactgacccctgtgagagtggcaactttagagtacacacagtcatgaccctagaacagcaggacatggtctgctatacagctcagactctcgtccgaatcctctcacatggtggctttaggaagatccttggccaggagggtgatgccagctatcttgcttctgaaatatctacctgggatggagtgatagtaacaccttcagaaaaggcttatgagaagccaccagagaagaaggaaggagaggaagaagaggagaatacagaagaaccacctcaaggagaggaagaagaaagcatggaaactcaggagtgacattcccttcactccttttcctacccaagggggaagactggagcctaagctgcctgctactgggctttacatggtgacagacatttccgtgggatagggaagatagcaggaagaaaagtaaactccatagaagtgtcattccactgggttttgatattggcttagctgccagtctcccatttgtgacctatgccatccatctataatggaggataccaacatttcttcctaatattctataatctccaactcctgaaaacccctctctcaactaatactttgctgttgaaatgttgtgaaatgttaagtgtctggaaatttttttttctaagaaaaactattaaagtacttcctagtaaaaaaaaaaaaaaaaaaaaaaaaaa

SEQ ID NO: 126 - DNA, 2701 bp, Homo sapiens
gttgctgcggagccaggaggggaagcgatggctgggcccgcgtggatctctaaggtctctcggctgctgggggcattccacaacccaaaacaggtgaccagaggttttactggtggtgttcagacagtaactttaattccaggagatggtattggcccagaaatttcagctgcagttatgaagatttttgatgctgccaaagcacctattcagtgggaggagcggaacgtcactgccattcaaggacctggaggaaagtggatgatcccttcagaggctaaagagtccatggataagaacaagatgggcttgaaaggccctttgaagaccccaatagcagccggtcacccatctatgaatttactgctgcgcaaaacatttgacctttacgcgaatgtccgaccatgtgtctctatcgaaggctataaaaccccttacaccgatgtaaatattgtgaccattcgagagaacacagaaggagaatacagtggaattgagcatgtgattgttgatggagtcgtgcagagtatcaagctcatcaccgagggggcgagcaagcgcattgctgagtttgcctttgagtatgcccggaacaaccaccggagcaacgtcacggcggtgcacaaagccaacatcatgcggatgtcagatgggctttttctacaaaaatgcagggaagttgcagaaagctgtaaagatattaaatttaatgagatgtaccttgatacagtatgtttgaatatggtacaagatccttcccaatttgatgttcttgttatgccaaatttgtatggagacatccttagtgacttgtgtgcaggattgatcggaggtctcggtgtgacaccaagtggcaacattggagccaatggggttgcaatttttgagtcggttcatgggacggctccagacattgcaggcaaggacatggcgaatcccacagccctcctgctcagtgccgtgatgatgctgcgccacatgggactttttgaccatgctgcaagaattgaggctgcgtgttttgctacaattaaggacggaaagagcttgacaaaagatttgggaggcaatgcaaaatgctcagacttcacagaggaaatctgtcgccgagtaaaagatttagattaacacttctacaactggcatttacatcagtcactctaaatggacaccacatgaacctctgtttagaatacctacgtatgtatgcattggtttgcttgtttcttgacagtacatttttagatctggccttttcttaacaaaatctgtgcaaaagatgcaggtggatgtccctaggtctgttttcaaagaactttttccaagtgcttgttttatttattaagtgtctacctggtaaatgttttttttgtaaactctgagtggactgtatcatttgctattctaaaccattttacacttaagttaaaatagtttctcttcagctgtaaataacaggatacagaattaacaagagaaaatgtctaactttttaagaaaaaccttattttcttcggtttttgaaaaacataatggaaataaaacaggatattgacataatagcacaaaatgacactcttctaaaactaaatgggcacaagagaattttcctgggaaagttcacatcaaaaagagtgaatgtggtatatttctaaatgatatggaaaatagagacagatttgtcctttacagaaattactgagtgtgaataaaaacttcagatccaagaaatatataatgagagatataatttttgttaataagacaaaggtaatatattggatacaaagacacaaatgtattgtgtgttcaattattttgttgtcttgagatttaatattctttccaagagcttttaatgaagcagagagctagtacttcattttcactggatacattttcagcatcatgagttgtcacagcctctgagcccctgatctgaagccagaagggctgagtgtattgtaaacttattcttgcatgttgctgtctgggaatggaccacactacagcaggtagttctgggggcgatactgccgaaaggcccgaacacatgtattttggctgcaattgaggaacttgggatgctattaattttgtatttcagcaactgccccttctcctatcccaaagcaccaattactgccctctgcctcagcagtaccagtataagatgacattccaaagactggaggcaactcagcctgagttaattcacaaaattatgccatgctggggcttgagcttgagcttgggcttaggcttgggctcagcttttgaccctcaggcatctcctttcccttcctgtcttcctctcccttctcctctgctgcagcatgattttcttaatcttcagacactcactattttcatgaacagttaccctctgtccccacaaccaaagacaactcatggcctcctttggcccttgtgtaacattgcaaacctgtggctttgcaaaatgtacccaggtcacaaggggatttttttttttttagcaatgatatccctgtctgggtcactttttaagcttgtaaccgcccccccagacttataatcttaaatgtattttcctttgtttaagctgctgcttcctctgtttcattggattgtgccagttatcagtggctcttgggttcaaagtaataaagaattccaaaactgaaaaaaaaaaaaaaaaaaaaaaaaaaaaaaaaaaaaa

SEQ ID NO: 127 - DNA, 6699 bp, Homo sapiens
atgaaagtgccgcgtggcattggtcttgtcttcatatttgcggtggccgccgcgttggtggccggcctcatcctgaccattgtcctcgtcagtcggcccagtccagcagagccattcactggccgtgtcataactgtgggtatctgtaattccgggtcagagccttcaaaagcttcgagcttccggtttaagcgggatgcaacgacaagttgctcattcgatgcgaaccgggatcagttgaaaaatttcttatccagttcagcggcagacaccagcttcattgtaatgtcctattcagacaagccttcgccatcaactgtattgcccagagatcaagctatagaattgctaaatagtatgaaaaaggacgggtctaaaactatacagcaagcccccgcattcgcaagttacgatccaaaagcttatgaaaactcggatttagtatttttcactccatgtaaaactgattatacagggtatgacgcagatatggcagcagtgcgaaccacaatcaataatgtccaaacgaaaaagtatgtgattgtatctttggcaatggatcagggtaacatgactcagaagtatggagacttgaacacccataacattggaaataatgcaacagatatcactaatgatattaacaatgtattaaatatcacagctgcaaccagtccaagcaccgctgtaacgagtccatcatcactgggtacaagttcatcaccattgccaagttcaattagtacgtctgcacttccaatagctagctcttctgcttcatctagtccatctgcagcatctagtacaaccccggtagttttgtctagctccactattcaaagttcatcaggaacttttccaagttctgttgcatctagcccatcgacggtaggatctactagtggagcagcttcatctagctcgtatgcaacagtgtcaacaatcgcaggatctactggttctacaattacacctgtgccaggatcatccagcacaatcggatcctcaacaccatctgcatcatctagctcttccggaacgatgtcgactatttcaggatcaactggttccacagttacagtcgtgcctggatcctctagcacatttgcatcctcaacaccaatagcttcatctagctcacctggttcaactgtcactgttgccccaggatcttccagcacttatggatcctcaacaccatcagcgtcatctagttcctccggaactatgtccacaaattcgggatcaactggttctacagttactgttgcaccagtatcgtctagtacatttggatcctcaacaccaatagcttcatctagctcatctggttctactgtcaccgttgtctcaggatcttccagcacatacggatcgtcaacaccatccgcgtcatctagttccgctggaactgcgtcgacaatctcaggatcaactggttcaacagctacaattgtaccaggatcttcaagctcggttggatcctcaacacagtcggcttcgcccagctcacctggaactatgtccacagtctctggaccaacgggttctacagtcacagttgtgccaggatcatctacatcaccagctccatcaagctcaccaaatccatcttcctcacctgcatcgaccggctcaacaatcacaattagtggttcttcaagcataattgtttccaccgtctccggttccaccgtctccggatcaaccggaacatcccagtccacacttgcatcgtcaactgcgacaccaggtagtagcagtaccgttccatcctcatcaagcccccaaccatccagtcagtcccctgcacctaatacgggatccacaaccccctcccagacctcgtcccaatctccttcccccagcatgaatccctcttcatcgacacccacaggatcatcgcagtctacaatcacaccggaaggttcgacagctagcagtccgactggaagcactggatccacattctcagttgcaacagaggtcacatcccaatcaaccgttccttcgggcagctctcttggaacacaatcgaccaacagttccccatcccccagctctctctccccctctacatctggaatgagtactttgacctcggaaccatccccaagttccacacagtcatcaggagcacaaagtacattaacaacaccatcccccaacccatcccaatcaaccagctcactggaatcatctacatcaggcgccaccacgtcatctggatcggcaggaactactatgacatccccctcccaatcatcatcagttggaagctcgcaaggatccactagtccagctgcatcaacgacatcaggagaaatgacatctcaaggttccacacaaacacctggatcttcagtatcaacatctgctgcgattttgacatcaacgcaacaatccgtgtctaccaatagccctggatcaacagtgactcgaccatctactgttagcggttcgacgagttctggaagcacagttaccgtaggatccacggaagcgagtacatcaggtagttcagttgctagcagttcccccgccccatccacttcccaaaatcccaatccttcaacttcaagcggaagttccatgattacccaatccccttacccatcccaatctaccagcccagtggagtcctctaccacaccatctcctgggtcacctggaaccactttaacatccacttccccctccccatcccaatcaactacaattggaagcacacaaggatccacaagcccaggtatttcaacgacatccgaagaaatgacatcccaaggttcaactcaaacaccaggtagtactggatccacagtgactcagccgtccactgttagtgattcgacaagctctggaagcacggtcacagtcggatccacagaaggaagcagttcccccatcccatccacttcccaaaatacaaatccttcaacttcaagcggaagttccatgagtacccaaaccccccagtcgtcccaatctactagtccagtagaatcgtctacatccggtgctacctcatcttctgggtcacctggaaccacgttgacatcaatttccccctccccatccccatcatcaacaatcggtagctctcaaggatcaaccagtccagttgtttcaacaatatcccaaggttcaacggaaacaccaggtagtactggatccacagtgactaaaccgtctacggttagtggttccgcaagctctggtagcacagctacaatgggatctacggaagcaagcagtacatcaggtggtagtagtacttcccccaacccatctcaatctactagtccgtctacttccggcgctacctcatcgcctgggtcatctggaacaacgttgacatccatttccccctccccgtctcaatcatcaacaatcggaagctcgcaaggatccactagcccagtagtttccacgacttcgggagatatgacatcgcaaggttcaactcagataccaggtagtacaggatccacagtgactcaaccgtctacaggtagtggttccacaagcacatcaggagaaatcacatcccaaggttccactcaaacaccaagatcttcattgtcaacttctcctgctatttctacatcaacgcaacaatcagtgtccaccaatagccctgggtccacagtgactcaaccgtctacggttcgtggctccacaagctctggaagcacagttaccactggatctacagaaggaagcagtacatcaggtagttcatctgctacttctttaagtagcagttcccccgtcccatcaacttcccaatcccctaacccttccacgtccggtagtagtactccaacccccaacccatcccaatccactagtccagttgtttcaacaacaactggagaaatgacatctcatggttcaactcagacaccaagtactattggatcaacagtgactcaaccgtctactgtcagtggatcgaacagttctggaagcacagttaccattggatcttcggaagcaagcacctcaggtagttcgtttaaaacatccccgagtagcatttccccagttcctacctcttcccctatcccgtcgacaacattcgcaagtagcacatcaggttccacgatctcggatgtctcttcagtctctacgacttcactagcgcctttgtctagttccctcccatcaacagtcccatctagtacccaatccttcagtagcacgtccgaaggatcttcgaaagcctcttcctccccagttccctcccaaacaagtagtacccccacaaatccaaccggctcgactgagtcctcaacacttctatcttcgaccatatcgggctccactcagcacacaacaatgtcaaaagctagctcgggctccacaagcccttcgacaaattctcagactggaagcactgtaaccatgggatcatcaagcacttccggtgtttccacatcttcagcatccagtactcagcctcagatgagcacttcacaaggaagttcagcaggatccacagttgcttcttcaacagctagccctgctgcgagttccacagctccatcttcaactggaactatgagctccacttctagtggaacagttggatctacaatttctgaatcatcgacaacagcatctgcaagttctcagactggaagcactgtaaccatgggatcatcaagcacttccggtgtttccacatcttcagcatccagtactcagcctcagatgagcacttcacaaggaagttcagcaggatccacagttgcttcatcaaccgctggccttgtttcaacttccacagttccatcctcgacaggaacaatgggctccacttctagtggaacagttggatctacaatttctgaatcatcgacaacagcatctgcaagttctcagactggaagcactgtaaccatgggatcatcaagcacttccggtgtttccacatcttcagcatccagtactcagcctcagatgagcacttcacaaggaagttcagcaggatccacagttgcttcatcaaccactggccttgtttcaacttccacagttccatcctcgacaggaacaatgggctccacttctagtggaacagttggatctacaatttctgaatcatcgacagcagcatctgcaagttctcagactggaagcactgtaaccatgggatcatcaagcacttccggtgtttccacatcttcagcatccagtggtcagcctcagatgagcacttcacaaggaagttcagcaggatccacagttgtttcttcaacagctagccctgctgcgagttccacagctccatcttcaactggaactatgagctccacttctagtggaacagttggatcaacgatgtctcagtcttcaacagcagcttccacaacttctcacacgggaagcacagtaaccctcggatcttcaagtacctccagtaatcaaatgagcacttcacaaggaagttccgtaggatccacagtagcttcatcaaccgctggccttgtttcaacttccacagttccatcctcgacaggaacaatgggctccacttctagtggaacagttggatctacaatttctgaatcatcgacaacagcatctgcaagttctcagactggaagcactgtaaccatgggatcatcaagcacttccggtgtttccacatcttcagcatccagtactcagcctcagatgagcacttcacaaggaagttcagcaggatccacagttgcttcatcaaccgctggccttgtttcaacttccacagttccatcctcgacaggaacaatgggctccacttctagtggaacagttggatctacaatttctgaatcatcgacagcagcatctacaagttctcagactggaagtaccgtgacaatcggttcaaccagtggaacaaatccctcctcgccccgttccctatcccagatcacaataacgccgagcccatcccaatcaacggagagtacccaaacatccctcccatccagttccccctccccatcaacacattctgtgagcagctcagaaggaacaacaatgtcttctggtgcaacgacatcaggagacaaaatgagttttctgtcgtcgacaggaacaacagtgtcgttcagttcaagaggttcatcactcgccacaacttccgcgccaaaacccagtgtgacttgtctgttcatgtacgatacacaatccaaagaaatagatcaaacagctataaacacgtataaaacttatttcaatttcgctctactggttgcttccaaattgaacaatgaatcaattttgactggatacatcgataacttcggatacagtgctgggttgaatgatcatcaatattaccctactgacgactacaatggtattaagtctgtacctttcccaattgatggcactgatgacgacattgatcttgatttgaaagatgtcgacaaaagtttggcaacagcagattggacaccaccagtggctgaccaaacctgcatgattttcatttctgctgcaccagaagatgagtatgggggcactactataaaatcgacttatacttacttcgagacagtcgttggagttcttgttggaggagctaaaagtataccgggactttcaattgacaaaaatatagttatcacgaacaatacaatgaacgaccgtgacgctagtgcagttgtcagcaaacttctagaacttcttccaacggcgtaa

SEQ ID NO: 128 - DNA, 4248 bp, Homo sapiens
cccgggctgtgggctacaggcgcagagcgggccaggcgcggagctggcggcagtgacaggaggcgcgaacccgcagcgcttaccgcgcggcgccgcaccatggagcccgccgtgtcgctggccgtgtgcgcgctgctcttcctgctgtgggtgcgcctgaaggggctggagttcgtgctcatccaccagcgctgggtgttcgtgtgcctcttcctcctgccgctctcgcttatcttcgatatctactactacgtgcgcgcctgggtggtgttcaagctcagcagcgctccgcgcctgcacgagcagcgcgtgcgggacatccagaagcaggtgcgggaatggaaggagcagggtagcaagaccttcatgtgcacggggcgccctggctggctcactgtctcactacgtgtcgggaagtacaagaagacacacaaaaacatcatgatcaacctgatggacattctggaagtggacaccaagaaacagattgtccgtgtggagcccttggtgaccatgggccaggtgactgccctgctgacctccattggctggactctccccgtgttgcctgagcttgatgacctcacagtggggggcttgatcatgggcacaggcatcgagtcatcatcccacaagtacggcctgttccaacacatctgcactgcttacgagctggtcctggctgatggcagctttgtgcgatgcactccgtccgaaaactcagacctgttctatgccgtaccctggtcctgtgggacgctgggtttcctggtggccgctgagatccgcatcatccctgccaagaagtacgtcaagctgcgtttcgagccagtgcggggcctggaggctatctgtgccaagttcacccacgagtcccagcggcaggagaaccacttcgtggaagggctgctctactccctggatgaggctgtcattatgacaggggtcatgacagatgaggcagagcccagcaagctgaatagcattggcaattactacaagccgtggttctttaagcatgtggagaactatctgaagacaaaccgagagggcctggagtacattcccttgagacactactaccaccgccacacgcgcagcatcttctgggagctccaggacatcatcccctttggcaacaaccccatcttccgctacctctttggctggatggtgcctcccaagatctccctcctgaagctgacccagggtgagaccctgcgcaagctgtacgagcagcaccacgtggtgcaggacatgctggtgcccatgaagtgcctgcagcaggccctgcacaccttccaaaacgacatccacgtctaccccatctggctgtgtccgttcatcctgcccagccagccaggcctagtgcaccccaaaggaaatgaggcagagctctacatcgacattggagcatatggggagccgcgtgtgaaacactttgaagccaggtcctgcatgaggcagctggagaagtttgtccgcagcgtgcatggcttccagatgctgtatgccgactgctacatgaaccgggaggagttctgggagatgtttgatggctccttgtaccacaagctgcgagagaagctgggttgccaggacgccttccccgaggtgtacgacaagatctgcaaggccgccaggcactgagctggagcccgcctggagagacagacacgtgtgagtggtcaggcatcttcccttcactcaagcttggctgctttcctagatccacactttcaaagagaaacccctccagaactcccaccctgacagcccaacaccaccttcctcctggcttccagggggcagcccagtggaatggaaagaatgtgggatttggagtcagacaagcctgagtccagttccccgtttagaactcattagctgtgtgactctgggtgagtcccttaacccctctgagcccgggtctcttcattagttgaaagggatagtaatacctacttgcaggttgttgtcatctgagttgagcactggtcacattgaaggtgctgggtaagtggtagctcttgttgcttcccgttcagcgtcacatctgcagtggagcctgaaaaggctccacattaggtcacctgtgcacagccatggctggaatgatgaaggggatacgctggagttgccctgccatcgcctccatcagccagacgaggtcctcacaggagaaggacagctcttccccaccctgggatctcaggagggcagccacggagtggggaggccccagatgcgctgtgccaaagccaggtccgaggccaaagttctccctgccatccttggtgccgtcctgccccttcctccttcatgcctgggcctgcaggcccaccccagccaccactgagtccactcggagtgccctgtgttcctggagaaggcattccagggttgaatcttgtcccagcctcagcctgggacacctaggtggagagagtggtctccgctctgaattggatccaggggacctgggctcattcttcttggctcaccaaccctgcaggcctcatctttcccaaaacccactttgtcttggtgggagtgggtccgcgctgctctgcagcaggggctggggagtggacagcatcaggtgggaaagtggagtccaccctcatgtttctgtaggattctcaccgtggggctggaagaaaagagcatcgacttgatttctccaaccactcatccctctttttctttcttccaccactccccaccccagctgtagttaatttcagtgccttacaaatcctaagctcagagaaagttccatttccgttccagagggaagggaacctccctaggtccttccctggcttgttataacgcaaagcttggttgtttatgcaactctatcttaagaactgcccagcctcagctgaaaacccgaatctgagaaggaattgcgtcatgtaagggaagctggaattaagggagctgagccagtcatggttgtggcgtgtgagtcaggagacctaggtttcagcccctctctactgtcagcgagctgtgcaacgtgggcaagtcattgtcctctgagctgcagtttcctcatctgtcacatcgctacagacaagacctccctggaacccttctgattgtcttagacactgtggttgcaaaacccacggaaagcctcatttgtgtggaaagtcagaggaaaaatgatccagtggacacttggggattatctgtcattcaagatccttccttcaaccccaaggccagctcccatctcatttccagaaaggctcatacctggcttgcagggaagcatctgtcttgtcattccaggtgccagaatcctctcagagtcattgaagggtgttcacccatcccacccaaggcttggcacactgccagtgtcttagcagggtcttgtgagggctgggggcatccaggcactcagaaggcaaaggaaccaccctacccatttggcctctggagggggcagaagaaagaaagaaacctcatcctatattttacaaagcatgtgaattctggcattagctctcataggagacccatgtgcttccttgctcagtgcaaaactgatgattctacttgctgtagatgaatggttaacacgagctagttaaacagtgccattgttttgccagtgaagcctccaaccctaagccactgggacggtggccagagatgccagcagcctctgtcgcccttagtcatataaccaaaatccagaccttatccacaacccggggcttggaaaggaaggtattttggaatcacaccctccggttatgttgctccagtaaaatcttgcctggaaagaggcagtcttcttagcatggtgagctgagttcatggcttttttttgtagccagtcctgtccctggccatccatgtgatggttttggatggagttaaacttgatgccagtgggcagtgcatgtggaaagtatcagagtaagcctctcccctccagagccctgagtttcttggctgcatgaaggttttctttagaatcagaattgtagccagtttctttggccagaaggatgaatacttggatattactgaaagggaggggtggagatgggtgtggcagtgtatggtgtgtgatttttattttcttctttggtcatgggggccaaggagaaaggcatgaatcttccctgtcaggctcttacagccacaggcactgtgtctactgtctggaagacatgtccccgtggctgtggggccgctgcttctgtttaaataaaagtggcctgg

SEQ ID NO: 129 - DNA, 4627 bp, Homo sapiens
ccccggacgcagtgaggggggtcggcgcgcgtgtctacgcggacgcaccggctaagctgcttctgccgccgccggccgcctgggaccttgcggtgaggctgcgcggggccgaggccgcctccgagcgccaggtttattcagtcaccatgaagctgctgctgctgcacccggccttccagagctgcctcctgctgaccctgcttggcttatggagaaccacccctgaggctcacgcttcatccctgggtgcaccagctatcagcgctgcctccttcctgcaggatctaatacatcggtatggcgagggtgacagccccactctgcagcagctgaaggccctactcaaccacctggatgtgggagtgggccggggtaatgtcacccagcacgtgcaaggacacaggaacctctccacgtgctttagttctggagacctcttcactgcccacaatttcagcgagcagtcgcggattgggagcagcgagctccaggagttctgccccaccatcctccagcagctggattcccgggcctgcacctcggagaaccaggaaaacgaggagaatgagcagacggaggaggggcggccaagcgctgttgaagtgtggggctttggttttctcagtgtctcactgattaacctggcctctctcctgggagtcctcgtcctgccctgcacagagaaagcgtttttcagccgtgtgctcacttacttcatcgccctgtccattggaacgctgctgtctaacgcgctattccagctcatcccagaggcatttggtttcaaccctctggaagattattatgtctccaagtctgcagtggtgtttgggggcttttatcttttctttttcacagagaagatcttgaagattcttcttaagcagaaaaatgagcatcatcatggacacagccattatgcctctgagtcgcttccctccaagaaggaccaggaggagggggtgatggagaagctgcagaacggggacctggaccacatgattcctcagcactgcagcagtgagctggacggcaaggcgcccatggtggacgagaaggtcattgtgggctcgctctctgtgcaggacctgcaggcttcccagagtgcttgctactggctgaaaggtgtccgctactctgatatcggcactctggcctggatgatcactctgagcgacggcctccataatttcatcgatggcctggccatcggtgcttccttcactgtgtcagttttccaaggcatcagcacctcggtggccatcctctgtgaggagttcccacgtgagctaggagactttgtcatcctgctcaacgctgggatgagcatccaacaagctctcttcttcaacttcctttctgcctgctgctgctacctgggtctggcctttggcatcctggccggcagccacttctctgccaactggatttttgcgctagctggaggaatgttcttgtatatttctctggctgatatgttccctgagatgaatgaggtctgtcaagaggatgaaaggaagggcagcatcttgattccatttatcatccagaacctgggcctcctgactggattcaccatcatggtggtcctcaccatgtattcaggacagatccagattgggtagggctctgccaagagcctgtgggactggaagtcgggccctgggctgcccgatcgccagcccgaggacttaccatccacaatgcaccacggaagaggccgttctatgaaaaactgacacagactgtattcctgcattcaaatgtcagccgtttgtaaaatgctgtatcctaggaataagctgccctggtaaccagtctctagctagtgcctcttgccctctcctcacctccttttctctcagtgactctggaacctgaatgcagcttacaagacaagcctgacttttttctctgattaccttggcctcctcttggaaccagtgctgaaaggttttgaatcctttacccaacaatgcaaaaatagagccaatggttataacttggctagaaatatcaagagttgaatccatagtgtggggcccatgactctagctgggcaccttggacctccagctggccaatagaagagacaggagacaggaagccttcccattttttcaaagtctgtttaattgcctattacttctctcaaagagaacctgaagtcagaacacatgagcagggtgagaggtgaggcaaggttcatcctgaatgggagaggaagtcgaaccactgctgtgtgtcttgtcaggatgctcacttgttcctactgagatgctggatattgattttgtaacagcacctggtgtttcacggctgtccgagtgagctaacgtggcggtgtggctgcctggacctcctctttcaggttaacgctgacagaatggaggctcaggctgtctgcaagaaaacagttggtttggctgtgattttgacctcctcttccccactgccatcttctaagagactttgtagctgcctcctagaagcacattctgagcacatttgagacctctgtgttagaggggagactgcacaaactatcctcccccaggttgagacgtctgcagagtggcaagctgacttgtagaaatggggtgccatttatgctctacttagacaagggtaatcagaaatggaatcagtgcaggcaaaatttaggatttgccgcttccataaatcaaagcatgactaatagggggtctctgaaatgtaagggcacaaacttcacttagggcatcgcagatgtttgcagaatggttggcctaatgattatgctacagatgggttttaaatgacccgtctaggttactgcttccttgcaaaaaagtcgaatcctgcattgaattgaatatgaatttctctaactctctccagaaaatggatggagataacttgtctttaaaactgtaggccagccttggccactgtggagcccttgcctccgagctctggcttcaaggggagctcttctccaggttcactaggtgaattgatttattattatcatattgataatgtgagattctttagccactttggggagcctgtccctccagaagcctttcttagtggtgcccacagttggagcccaggggccatgtttgcaaactgattcatgtgcatggctgacaggagtactggttcactaccaatgcctgagcttttctcttacatagaaaaactgtccgctctcagtaatcacaagcagcatccgttttgttttctcttcttgggagacatctgtcaaaccaggaatattcttgaaaagaacgtgagcaggaaaaactgctggtgatactttttttaagttttgtttttatcttgcctgttggcttcaatacatttgagaatacgctgaagagggaaaatttcagtgatggagattctagattaaatatcaggactgatttcctggtgggattatggtccagttttaccaaagaaccaattccttgaatgttggaatctaactttttatattgtcattattattgttgtttttaaacggttctttgtcttttctgttttatttttctcaagctgctttcaggagctagcagaaaataactcaaagttgaagactctggaagattttgctttaacctaactcgcattgatgtattaaatttataattttagcattcccaatagatcctatcattccttaaacataataccctttgtcttggagtagaatactaagttagagttagtggatttctagtttaggagaggagctcaaaactataatctttaacaaattgaaaaatgaaatagggtgttttccctttttgtgcacacctatattaccttaagaaatttccttccatagacagctgcctcaaagggaaatcctctttaaaccgtagttggcgcagaggtcagtcctagtcggagcttaggaggggcggagacgctcacatcgtctgacttgagtcgccactgattgtggcaacagctttgcctcatgagtcaaaaattggcaatttcttttgatttttagttgttgaatttgctgtttcaagcatttgtacatattagaagtctaaggagtagcaagtcagtgggaggactttttcacccctggcattagcagcttcgacctcattttccagatgcaccagctcctattaataagttagcaaggaaagtgtatgtcacgtgcaggaacagtgaggcagggacaggggttctgctccttctcacttcaccaccggcacacagcttgcccctgtctttgcccccaaaggtattttgtgtctagtgtcaaattggagctattcttcactggtccttaaccttgggttttaaaaagaaggcttctctgtttgggtagcgtaagagctgagtatagtaagtcctcttccaaagagatggcaatatgctgggcatctactttaaaacaaagttgtctgatttttgcaagagaggttaggattttattgttcttatttccctttacagttctgcagttccatcacagtatttttttaaataactcaggtgtatgagaagaaattagaaaagaaaattaacttatgtggactgtaaatgttttatttgtaagattctataaataaagctatattctgtaattgttgagaaaaaaaaaaaaaaaaaa

SEQ ID NO: 130 - DNA, 1370 bp, Homo sapiens
ggcggcggcagctgtacagggcgggagaagcggtggtagcggaggctgtagtggggctggtggtgcttccaactgcgggacaggaagtggccgtagcggcttgttggataagtggaagatagatgataagcctgtaaaaattgacaagtgggatggatcagctgtgaaaaactctttggatgattctgccaaaaaggtacttctggaaaaatacaaatatgtggagaattttggtctaattgatggtcgcctcaccatctgtacaatctcctgtttctttgccatagtggctttgatttgggattatatgcacccctttccagagtccaaacccgttttggctttgtgtgtcatatcctattttgtgatgatggggattctgaccatttatacctcatataaggagaagagcatctttctcgtggcccacaggaaagatcctacaggaatggatcctgatgatatttggcagctgtcctccagtcttaaaaggtttgatgacaaatacaccttgaagctgaccttcatcagtgggagaacaaagcagcagcgggaagccgagttcacaaagtccattgctaagttttttgaccacagtgggacactggtcatggatgcatatgagcctgaaatatccaggctccatgacagtcttgccatagaaagaaaaataaagtagccaattctaaaagtagccctctttctcctggatcttgctgaattagtggcttggggggtgggggagataaaaagaacttaaaatgggtaaagtaagaaatgttaaaaagtccctgttttgtcctgaaattttagtctattctgggtaaataggattttctgacacagatatgagaagttgtagctctgatgtctagctgtagtctccttgatctgctgattgcattattttaatttgcttttctgggaaagcagttttgctaaaagctgtacagactttttcttttgtacctagcagtactttatatagtatagctttgggccatgtagcattttaagactcaattttaaaaaattattaatctgttgctgactcttaattcctatttcaatatgtgtttccttgaagaattcaggatacaacttcttgtgtatgacagctttccttcacacactatttttgtgggtgtgtatatatctgatttgggaagaatttaaaaaacacatagctttttaatttgtttgaaacagactttctgcctgttacatttttgcttttaaccaattaaagaagccaatggcattttagttttatattgtgttttccactagtatatccctgttgatttgtttgtgccttttattaactgccattttctaaaatttttttcaataaaaggaaggaagatgtg

SEQ ID NO: 131 - DNA, 3218 bp, Homo sapiens
ctcccggagatgccccgcggcagccgcgctcggggctctaagagaaaaaggagttggaatacagaatgcccatcctttccaggagaaagaccactgcaggtcagaagagcaggtctcaggacagcaggggcagctgcctctctctctgaagcatggctcaggtgtggagaagggtttcagaacacttctgggaatccgtcattaacagctgaagagaagacgattacagaaaagcaccttgaattatgccctagacccaagcaagaaaccaccacatctaaaagcaccagtgggcttacagacataacatggagctccagtggaagtgatttgtcggatgaagataagacactttctcagttacagagagatgaattacagtttatcgactgggagattgacagtgacagggcagaggctagtgactgtgatgaatttgaagatgacgagggtgctgtggaaatctcagactgtgcttcttgtgcaagtaatcagtctttgacaagtgatgagaagctgtcggagcttcccaagccaagttctatagaaattttagagtattcatcagatagtgaaaaagaagatgatttggaaaatgtcctactcattgattcagaatcccctcacaaataccacgtgcagtttgcatcggatgcaagacagattatggagagactgatagatccaaggacaaaatcaacagagaccattttgcatacacctcagaaacccacagctaagtttcccaggactccagaaaattcagcaaagaagaagcttttaagaggtggactagcagaaagactaaatggactgcagaatcgagagagatctgctatttctttgtggagacatcaatgtatttcttaccaaaagacactttcaggtagaaaatctggtgtattaactgtgaaaattttagagctgcatgaggaatgtgccatgcaagttgccatgtgtgagcagttattggggtcaccagccaccagctcctcccaaagtgtggctcccaggcctggagctggcctgaaagttctcttcaccaaggagactgcaggctacctcaggggccgtccccaggacactgtccggatcttccctccctggcaaaaactgattattccaagtggaagttgccctgttattctgaatacttacttttgtgagaaagttgttgccaaagaagattcagaaaaaacttgtgaagtgtactgtccggacataccccttccaagaagaagcatctctttggcccagatgtttgtaattaagggtctaacaaataattcacctgaaatccaggttgtgtgtagtggtgtagccactacagggacagcctggacccatgggcacaaagaagcaaaacagcgcatcccaaccagcactcccctgagggattctctcctggatgtggtggaaagccagggagctgcctcgtggccaggagctggagtccgagtggtggtgcaaagagtgtattctcttcccagcagagacagcaccaggggtcagcagggggccagctcaggacacacagacccagctggaactcgagcctgccttctggtacaagatgcctgtggaatgttcggtgaagtgcacttggagttcaccatgtcgaaggcaagacagttggaagggaagtcttgcagcctggtgggaatgaaggttctacagaaagtcaccagaggaaggacagcggggattttcagtttgattgacaccctgtggcccccagcgatacctctgaaaacacctggccgcgaccagccctgtgaagagataaaaactcatctgcctcctccagccttgtgttacatcctcacagctcatccaaatctgggacaaattgatataattgacgaagaccccatttataagctttaccagcctccagttacccgctgcttaagagacattctccagatgaatgatcttggtacccgttgcagtttctatgccacggtgatttaccaaaaaccacagctgaagagtctgctgcttctggagcaaagggagatctggctgctagtgaccgatgtcactctgcaaacgaaggaggagagagaccccaggctccccaaaaccctgctggtctatgtggcccccttgtgtgtgctgggctctgaagtcctggaggcactcgctggggctgcccctcacagcctcttcttcaaggacgctctccgtgaccagggtcggattgtttgtgctgaacgaactgtcctcttgcttcagaagccccttttgagtgtggtctctggtgcaagttcctgtgagctgcctggcccggtgatgctcgacagcctggactctgcaacacctgtcaactccatctgcagtgttcaaggcactgtggttggcgtggacgagagcactgctttctcatggcctgtgtgtgacatgtgtggcaacgggagattggaacagaggccggaagacagaggcgccttttcctgtggggactgctcccgggtggtcacatctcctgttctcaagaggcacctgcaggtcttcctggactgccgctcaagaccgcagtgcagagtgaaggtcaagctgttgcagcgcagcatttcctccctgctgaggtttgccgccggtgaagatgggagctacgaagtgaagagtgtcctcggaaaggaagtggggttgttaaattgttttgtccagtccgtaaccgcccacccgaccagctgcattggattggaggaaatcgagcttctgagtgcaggaggggcctctgcagaacactagcggttgccgcaggatctgtgaactttgcaatgtggctgcaagggtggtggtggtggtggtgatttggggtagttatttgttaactatggacacagtgaacgtagtttacgatcttgaaatgaaacttagatttttctggggaaatgttcagatacagttttgtgaactgtaaatcaaaatacctttttctacagtttatcttttattttctgcaaatttaggaacatatttactcgttttcacattgaatcttaagtttaagctcttcatttggtatttaggcaatatatgagaaaaaaattttttttgttcatttgtaattttaacaagttgaacattttaccatgattgaacatgtttttattacagtatttaacattcccccaaagaataccctgcaaagtgtaaacctttgtcccatactgtgatattactgttctgctacaataaatgtcaaacct

SEQ ID NO: 132 - DNA, 6407 bp, Homo sapiens
agtctgcgggcctccggggctgcggcgaggccggagcgtcgcggcggagaggacgagaccgggacaagaccagggcaggagggagccggccagccgcgagaaccccgcacgcccggcaagatgctgtccttgcggctgcagacgggccccgagaaggccgagctccaggagctcaacgcccggctctatgactacgtgtgtcgggtgcgggagctggagcgcgaaaacctactcctggaggaggagctgcgcggccggcgcgggcgagagggcctgtgggccgaggggcaggcccgctgcgccgaggaggcgcgcagcttgcggcagcagctggacgagctgagctgggccactgcgctggcggagggcgagcgggacgctctgcggcgcgagctgcgggagctgcagcgcctggatgcggaggagcgcgccgcccgcggccgcctggacgccgagctgggtgcgcagcagcgcgagctgcaggaggcgctgggcgcgcgcgccgccctcgaggcgctgctgggccgactgcaggccgagcgccgaggcctcgacgcggcccacgaacgcgacgtgagggagctgcgcgcgcgcgccgccagccttaccatgcatttccgcgcccgcgccaccggccccgccgcgccgccgccacgcctgcgggaggtgcacgacagctacgcactgctggtggccgagtcgtggcgggagacggtgcagctgtacgaggacgaggtgcgcgagctggaggaggcgctgcggcgcggccaggagagcagactccaggcggaggaagagacgcggctgtgcgcgcaggaggcagaggcgctgcggcgcgaggcgctcgggttggagcagctgcgcgcgcggctggaggacgcgctgctgcggatgcgcgaggagtacgggatacaggccgaggagcggcagagagtgattgactgcctggaggatgagaaggcaaccctcaccttggccatggctgactggctgcgggactatcaggacctcctgcaggtgaagaccggcctcagtttggaggtggcgacctaccgggccttattggaaggagaaagtaatccagagatagtgatctgggctgagcacgttgaaaacatgccgtcagaattcagaaacaaatcctatcactataccgactcactactacagagggaaaatgaaaggaatctattttcaaggcagaaagcacctttggcaagtttcaatcacagctcggcactgtattctaacctgtcagggcaccgtggatctcagacgggcacatctattggaggtgatgccagaagaggcttcttgggctcgggatattcttcctcggccactacccagcaggaaaactcatacggaaaagccgtcagcagtcaaaccaacgtcagaactttctctccaacctatggccttttaagaaatactgaggctcaagtgaaaacattccctgacagaccaaaagccggagatacaagggaggtccccgtttacataggtgaagattccacaattgcccgcgagtcgtaccgggatcgccgagacaaggtggcagcaggtgcttcggaaagcacacggtcaaatgagaggaccgtcattctgggaaagaaaacagaagtgaaagccacgagggagcaagaaagaaacagaccagaaaccatccgaacaaagccagaagagaaaatgttcgattctaaagagaaggcttccgaggagagaaacctaagatgggaagaattgacaaagttagataaggaagcgagacagagagaaagccagcagatgaaggagaaggctaaggagaaggactcactgaaggagaagagtgtgcgagagagagaggtgccgattagtctagaagtatcccaggacagaagagcagaggtgtccccgaaaggtttgcagacgcctgtgaaggatgctggtggtgggaccggtagagaggcagaagcaagagagctacggttcaggttgggcaccagtgatgccactggttctctgcaaggcgattccatgacagaaaccgtagcagaaaacatcgttaccagtatcctgaagcagttcactcagtctccagagacagaagcatctgctgattcttttccagacacaaaagtcacttacgtggacaggaaagagcttcctggggaaaggaaaacaaagactgaaatacttgtggagtctaaactgactgaggatgttgatgtttccgatgaagctggcctggactaccttttaagcaaggatattaaggaagtggggctgaaaggcaagtcagccgagcagatgataggagacatcatcaacctcggcctgaaagggagggaggggagagcaaaggtcgtcaacgtggagatcgtggaggagcccgtgagttatgtcagcggggagaagccggaggagttttccgtcccattcaaagtggaggaggtcgaagatgtgtcgccaggcccctgggggttggttaaggaggaggaaggttatggagaaagcgatgtcacattctcagttaatcagcatcgaaggaccaagcagcctcaggagaacacgactcacgtggaagaagtgacagaggcaggtgattcagagggcgagcagagttattttgtgtccactccagatgaacaccccggggggcacgacagagatgacggctcggtgtacgggcagatccacatcgaggaggaatccaccatcaggtactcttggcaggatgaaatcgtgcaggggactcgaaggaggacacagaaggacggtgcagtgggcgagaaggttgtgaagcccttggatgtcccagcgccctctctggagggggacctgggttccactcactggaaagaacaagctagaagcggtgaatttcatgccgaacccacagtcattgaaaaagaaattaaaataccccacgaattccacacctccatgaagggcatctcctccaaggagccccggcagcagctggtggaagtcatcgggcagctggaggaaacccttcccgagcgcatgagggaggagctgtccgccctcaccagagaggggcagggtgggccggggagcgtttccgtggatgtcaagaaggtccagggtgctggtggcagttccgtgaccctggttgctgaagtcaacgtctcacaaactgtggatgccgatcggttagacctggaggaggtgagcaaagatgaggccagtgagatggagaaggctgtggagtcggtggttcgggagagcctgagcaggcaacgcagcccagcgcctggcagcccagatgaggaaggtggagcggaggccccggctgctggcattcgctttaggcgttgggccacccgggagctgtacatcccttcaggcgagagcgaggttgctggtggggcctctcacagctcgggacagcgcactccccagggcccagtgtcggccactgtggaggtcagcagccccacaggctttgcccagtcacaggtgctggaggatgtgagccaggctgcaaggcacataaaactcggcccctctgaagtctggaggactgagcgaatgtcatatgaaggacccactgcagaagtggtggagatggatgtgagtaacgtagaggcgatccgcagccggacacaggaagcgggagctctcggtgtgtctgaccgtggttcctggagagacgcggacagtaggaatgaccaggcagttggtgtgagctttaaggcctctgctggggaaggagaccaggcccacagagaacagggcaaggagcaggccatgtttgataagaaggtgcagctccagagaatggtagaccaaaggtcggtgatttcagatgaaaagaaagttgccctcctctatctagacaatgaggaggaggagaatgatgggcattggttttaataagcagaaacattttgttttaatggcagcctgttggcgacgtgccaacatccaaaggccttaacttattttaagaggccgagggagtctatgaaaatctccccttttttacttttttaaagagtactcccggcatggtcaatttcctttatagttaatccgtaaaggtttccagttaattcatgccttaaaaggcactgcaattttatttttgagttgggacttttacaaaacacttttttccctggagtcttctctccacttctggagatgaatttctatgttttgcacctggtcacagacatggcttgcatctgtttgaaactacaattaattatagatgtcaaaacattaaccagattaaagtaatatatttaagagtaaattttgcttgcatgtgctaatatgaaataacagactaacattttaggggaaaaataaatacaatttagactctaaaaagtcttttcaaaaagaaatgggaaataggcagactgtttatgttaaaaaaattcttgctaaatgatttcatctttaggaaaaaattacttgccatatagagctaaattcatcttaagacttgaatgaattgctttctatgtacagaactttaaacaatatagtatttatggcgaggacagctgtagtctgttgtgatatttcacattctatttgcacaggttccctggcactggtagggtagatgattattgggaatcgcttacagtaccatttcattttttggcactaggtcattaagtagcacacagtctgaatgcccttttctggagtggccagttcctatcagactgtgcagacttgcgcttctctgcaccttatcccttagcacccaaacatttaatttcactggtgggaggtagaccttgaagacaatgaagagaatgccgatactcagactgcagctggaccggcaagctggctgtgtacaggaaaattggaagcacacagtggactgtgcctcttaaagatgcctttcccaaccctccattcatgggatgcaggtctttctgagctcaagggtgaaagatgaatacaataacaaccatgaacccacctcacggaagctttttttgcactttgaacagaagtcattgcagttggggtgttttgtccagggaaacagtttattaaatagaaggatgttttggggaaggaactggatatctctcctgcagcccagcaccgagatacccaggacgggcctggggggcgagaaaggcccccatgctcatgggccgcggagtgtggacctgtagataggcaccaccgagtttaagatactgggatgagcatgcttcattggattcattttattttacacgtcagtattgttttaaagtttctgtctgtaaagtgtagcatcatatataaaaagagtttcgctagcagcgcattttttttagttcaggctagcttctttcacataatgctgtctcagctgtatttccagtaacacagcatcatcacactgactgtggcgcactggggaataacagtctgagctagcaccaccctcagccaggctacaacgacagcactggagggtcttccctctcagattcacctggaggccctcagacccccagggtgcacgtctccccaggtcctgggagtggctaccgcaggtagtttctggagagcacgttttcttcattgataagtggaggagaaatgcagcacagctttcaagatactattttaaaaacaccatgaatcagatagggaaagaaagttgattggaatggcaagtttaaacctttgttgtccatctgccaaatgaactagtgattgtcagactggtatggaggtgactgctttgtaaggttttgtcgtttctaatacagacagagatgtgctgattttgttttagctgtaacaggtaatggtttttggatagatgattgactggtgagaatttggtcaaggtgacagcctcctgtctgatgacaggacagactggtggtgaggagtctaagtgggctcagtttgatgtcagtgtctgggctcatgacttgtaaatggaagctgatgtgaacaggtaattaatattatgacccacttctatttactttgggaaatatcttggatcttaattatcatctgcaagtttcaagaagtattctgccaaaagtatttacaagtatggactcatgagctattgttggttgctaaatgtgaatcacgcgggagtgagtgtgcccttcacactgtgacattgtgacattgtgacaagctccatgtcctttaaaatcagtcactctgcacacaagagaaatcaacttcgtggttggatggggccggaacacaaccagtctttttgtatttattgttactgagacaaaacagtactcactgagtgtttttcagtttcctactggtggttttgatattgtttgtttaagatgtatatttagaatgacatcatctaagaagctgattttgctaaactcctgttccctacaatgggaaatgtcacaagaatgtgcaaaaataaaaatctgagg

SEQ ID NO: 133 - DNA, 2963 bp, Homo sapiens
ggacagtctgagggagccactgtcccttgtccactgactcactggctggtccgagttttctccgcttctggcagtggcacctccgctgagcttttaaaccaagtcattgggacttagcgtctttctacccggcagggaagggaggagttggcaagaatttggctcacccattccccctgcaagcctccagcgtcgcggagcactagacatctactatgactgacaccgtgttcagcaacagttctaaccgttggatgtaccccagtgaccggccccttcaatcaaagctccaggcaggctggtccgtccaccccggtggtcagcctgacaggcagaggaagcaggaagagctgactgatgaggagaaagaaatcatcaacagggtgattgctcgagctgagaaaatggaagagatggagcaggagcgaatcggacgcctggtggaccgcctagaaaacatgaggaagaacgtggctggagatggggtgaaccgctgcatactgtgtggagaacagctggggatgctgggctctgcctgtgtagtatgtgaggactgtaagaagaacgtctgcaccaagtgcggagtggagaccaacaaccgcctgcattctgtgtggctctgcaaaatctgcattgagcagagggaggtgtggaagcgttctggagcgtggttcttcaaaggcttccccaaacaggtcctcccacagcctatgcctataaagaagaccaagccccagcagcctgtcagtgagcctgctgcccctgaacagcctgctcctgagcccaagcaccctgcccgggctccagctcgaggtgacagtgaagataggaggggcccgggtcagaagacaggccctgacccagcctctgctcccgggcgaggaaactatgggcctcccgtgcgcagggcctccgaggcacgaatgagctcatctagccgagattcagagagctgggaccacagtgggggtgctggagactccagccggagcccagcaggtttgagacgggccaactcagtccaggcctccagacctgccccaggctcggtgcagagcccagcgccacctcagcctgggcagccagggaccccaggaggaagcagaccgggtcctgggccagcaggacgctttccagatcagaagccagaggtggctccgagcgaccctgggaccactgccccaccccgagaggagagaacagggggagtcgggggctacccagcagttggagccagagaggaccgaatgagccacccctccggaccctattcccaagcatctgcagctgccccccagcctgctgcagcccgccagccaccacccccagaggaggaggaagaggaagccaacagctacgattcggatgaagcaaccaccctgggtgccctggaattcagccttctctacgaccaggacaacagctccctgcagtgcaccatcattaaggccaagggcctgaagcccatggattcaaatggcttggctgatccctacgttaagctgcacctcctgccgggagccagcaagtccaacaagcttcgtacaaaaactctgcggaatacccggaaccccatctggaatgagaccctcgtgtatcacggcatcaccgatgaggacatgcaaaggaagaccctcaggatctccgtctgtgatgaggacaaattcggccacaatgaatttattggtgagaccagattctccctcaagaaactgaagcccaaccagaggaagaatttcaacatctgcctggagcgagtgattcctatgaaacgtgctgggaccaccgggtcagcccgaggcatggccctttatgaggaagagcaggtggagcgtgttggtgacatcgaggagcgtggcaagatcctggtctccctcatgtacagcacacagcagggaggcctcattgtgggcatcatacgctgcgtgcacctggctgccatggacgctaatggctactcagacccattcgtcaagctctggctgaaaccggacatgggaaagaaggccaaacacaagactcaaattaaaaagaaaaccttgaatcccgaattcaatgaggagtttttctatgacatcaaacacagtgacctggcaaagaagtcactggacatttcagtctgggactatgacatcggcaagtccaatgattacatcggaggctgccagctggggatctctgccaagggagagcgcttaaaacactggtacgagtgtctgaaaaataaagacaagaagatagagcgctggcaccagctacagaatgagaaccacgtgtcaagtgattaggctagtgcccaggtccccatctccatgtcccgggtcccccccagcctgctctagctgcccaccgcaccctgatctctcttctctatgcctacctccccccataccctgctgatctccctgagcctgcctttgagcccccgtcacgttgggcactgctgccaaagactccctcctccctgatgctgggatgtgggctctgaatacagcccctctctcatccctgggatggagcaatggggatggggttggggagacgtttacaaagaggttgatcatttaataacctctcagtttgggtaaattacaaaggttcttcatcatttaggactgtttttagaccctcctagccttgaacacacacatgtacacacacacacacacacacacacacaccctttcattccctgtgttgtgtctctgtatatccccagttgtcagcagacccggacaatgctgtgagagaagcattggggcacaaatagagcctccgggctcccactgccccctgagatgtacaccctgattgccaggaaaacagactgctgtgttcagtaacacaccctccctgctccaagtgcaccaggatgcaaatgcacagaattcaccaggggcttggacgctctcctctttccgaatgtcacctgtgtgcttcctagcaaaaaaaaaaaaaaaaaa

SEQ ID NO: 134 - DNA, 4905 bp, Homo sapiens
ataatctggagagacagaggagttgagagtgcccctttaaactgcaggactgcaattgatctctgtatgttttctggttttcgtccctttgaaaggggaatgagagccaggatcattggctgtactgtggagctgtcacatctccatactgaaaaggtacactgcaagtgaatttaaaccgtttttggctttctattgcatattgccaagagctttgagactgatgaaccaagtaaatgctctatttagggctaagtgagatacagattcctccaatctgatagcgtttcagcctccggagtgaggaagcagcagaaacagaagcagcagaagcaacagcagtagcagcggcagcagcaacagcagcagcccctactgaagtccaatagaggagacttgatctctagttcattctggaactccgcctgggattgtgcactgtccagggtcctgaaacatgaaccaaactgccagcgtgtcccatcacatcaagtgtcaaccctcaaaaacaatcaaggaactgggaagtaacagccctccacagagaaactggaagggaattgctattgctctgctggtgattttagttgtatgctcactcatcactatgtcagtcatcctcttaaccccagatgaactcacaaattcgtcagaaaccagattgtctttggaagacctctttaggaaagactttgtgcttcacgatccagaggctcggtggatcaatgatacagatgtggtgtataaaagcgagaatggacatgtcattaaactgaatatagaaacaaatgctaccacattattattggaaaacacaacttttgtaaccttcaaagcatcaagacattcagtttcaccagatttaaaatatgtccttctggcatatgatgtcaaacagatttttcattattcatatactgcttcatatgtgatttacaacatacacactagggaagtttgggagttaaatcctccagaagtagaggactccgtcttgcagtacgcggcctggggtgtccaagggcagcagctgatttatatttttgaaaataatatctactatcaacctgatataaagagcagttcattgcgactgacatcttctggaaaagaagaaataatttttaatgggattgctgactggttatatgaagaggaactcctgcattctcacatcgcccactggtggtcaccagatggagaaagacttgccttcctgatgataaatgactctttggtacccaccatggttatccctcggtttactggagcgttgtatcccaaaggaaagcagtatccgtatcctaaggcaggtcaaatgaacccaacaataaaattatatgttgtaaacctgtatggaccaactcacactttggagctcatgccacctgacagctttaaatcaagagaatactatatcactatggttaaatgggtaagcaataccaagactgtggtaagatggttaaaccgagctcagaacatctccatcctcacagtctgtgagaccactacaggtgcttgtagtaaaaaatatgagatgacatcagatacgtggctctctcagcagaatgaggagcccgtgttttctagagacggcagcaaattctttatgacagtgcctgttaagcaagggggacgtggagaatttcaccacatagctatgttcctcatccagagtaaaagtgagcaaattaccgtgcggcatctgacatcaggaaactgggaagtgataaagatcttggcatacgatgaaactactcaaaaaatttactttctgagcactgaatcttctcccagaggaaggcagctgtacagtgcttctactgaaggattattgaatcgccaatgcatttcatgtaatttcatgaaagaacaatgtacatattttgatgccagttttagtcccatgaatcaacatttcttattattctgtgaaggtccaagggtcccagtggtcagcctacatagtacggacaacccagcaaaatattttatattggaaagcaattctatgctgaaggaagctatcctgaagaagaagataggaaagccagaaattaaaatccttcatattgacgactatgaacttcctttacagttgtcccttcccaaagattttatggaccgaaaccagtatgctcttctgttaataatggatgaagaaccaggaggccagctggttacagataagttccatattgactgggattccgtactcattgacatggataatgtcattgtagcaagatttgatggcagaggaagtggattccagggtctgaaaattttgcaggagattcatcgaagattaggttcagtagaagtaaaggaccaaataacagctgtgaaatttttgctgaaactgccttacattgactccaaaagattaagcatttttggaaagggttatggtggctatattgcatcaatgatcttaaaatcagatgaaaagctttttaaatgtggatccgtggttgcacctatcacagacttgaaattgtatgcctcagctttctctgaaagataccttgggatgccatctaaggaagaaagcacttaccaggcagccagtgtgctacataatgttcatggcttgaaagaagaaaatatattaataattcatggaactgctgacacaaaagttcatttccaacactcagcagaattaatcaagcacctaataaaagctggagtgaattatactatgcaggtctacccagatgaaggtcataacgtatctgagaagagcaagtatcatctctacagcacaatcctcaaattcttcagtgattgtttgaaggaagaaatatctgtgctaccacaggaaccagaagaagatgaataatggaccgtatttatacagaactgaagggaatattgaggctcaatgaaacctgacaaagagactgtaatattgtagttgctccagaatgtcaagggcagcttacggagatgtcactggagcagcacgctcagagacagtgaactagcatttgaatacacaagtccaagtctactgtgttgctaggggtgcagaacccgtttctttgtatgagagaggtcaaagggttggtttcctgggagaaattagttttgcattaaagtaggagtagtgcatgttttcttctgttatccccctgtttgttctgtaactagttgctctcattttaatttcactggccaccatcatctttgcatataatgcacaatctatcatctgtcctacagtccctgatctttcatggctgagctgcaatctaacactttactgtacctttataataagtgcaattctttcattgtctattattatgcttaagaaaatattcagttaataaaaaacagagtattttatgtaatttctgtttttaaaaagacattattaaatgggtcaaaggacatatagaaatgtggatttcagcaccttccaaagttcagccagttatcagtagatacaatatctttaaatgaacacacgagtgtatgtctcacaatatatatacacaagtgtgcatatacagttaatgaaactatctttaaatgttattcatgctataaagagtaaacgtttgatgaattagaagagatgctcttttccaagctataatggatgctttgtttaatgagccaaatatgatgaaacattttttccaattcaaattctagctattgctttcctataaatgtttgggttgtgtttggtattgtttttagtggttaatagttttccagttgcatttaattttttgaatatgataccttgtcacatgtaaattagatacttaaatattaaattatagtttctgataaagaaattttgttaacaatgcaatgccactgagtgctattttgctcttttggtggagaaggcttttttcaaaactcttggtccttttacttctttctctcagtgcagaatcaattctcattttcatcgtaaaagcaaatagctggattatttcatttgccagtttctatttagtattccatgcctgcccaattcatctgttactgtttaatttcaattcttctggtgagaattagaaatgaaatattttttattcattggccaaaaagttcacagacagcagtgtttgctatttactttgaattgaaggcacaaaatgcatcaattcctgtgctgtgttgacttgcagtagtaagtaactgagagcataaaataaacctgactgtatgaagtcaatttaagtgatgagaacatttaactttggtgactaaagtcagaatatcttctcacttcacttaagggatcttccagaagatatctaaaagtctgtaataagcttagaagttcagataaatctaggcaggatactgcatttttgtggttttaaaaaagtccttaggacagactgaattatcataacttatggcatcaggaggaaactttaaaatatcaaggaatcactcagtcaccctcctgttttgttgaaggatcaaccccaaattctgggtatttgagtacatgtgaatcatggatttggtattcaactttttccctggatgctttggaatcgtgtcttccatgctccactgggttcaatttaaaataggagaggctttctcttctgaaagatccattttaggtctttttcaagaatagtgaacacattttttaacaaaataagttgtaattttaaaaggaaagttttgcctattttattaagatggaaatttctttttaggctaatttgaaatccaactgaagctttttaaccaatattttaaatttgaaccactagagtcttttatgatgcaaatgattatgttgtctgaaaggtgtggttttattgaatgtctatttgagtatcatttaaaaagtatttgccttttactgtcaaaaaaaaaaaaaaaaaaaaaaaaagaaaaaaaaaaaaaaaa

SEQ ID NO: 135 - DNA, 4192 bp, Homo sapiens
agcggataagctccagccttcctgtggccacagcaggaccagagtggaccagcacaccccaggagagaggactggggtcccaggagtaggaggagcccgagcaccatgagctccggagaccctgcacacctcggcctctgcgtctggctgtggctgggcgccaccctgggaagagagcaagttcaagcaagcggtctcctgaggctggctgtgctgcctgaggaccggctgcagatgaagtggagagagtcggaggggagcggcctcggctacctggtgcaggtgaagcccatggcaggggactcggaacaggaggtgatactgaccaccaagacccataaggccacagtggggggcctgagcccctccaagggctacaccttgcagatcttcgagctcactggctctgggcgcttcctgctagctcggagggagtttgtgattgaggatctgaagagtagctccctggacaggagcagccagaggcccctcggctctggagccccggagcccaccccctcccacacggggagcccagaccctgagcaggcttctgagccccaagttgccttcacaccaagccaggatccgcgcactcctgccggcccccagttccgctgcctgccccccgtgcctgctgacatggtcttcctggtggacgggtcctggagcattggccacagtcacttccagcaggtcaaggacttcctggccagtgtcatcgcaccctttgaaatcgggccggataaggtccaagtaggcctgactcagtacagcggggatgctcagactgagtgggacctgaactccctcagcaccaaggaacaggtgctggcagctgtgcgccgcctccgctacaagggggggaacacgttcacaggccttgccctgacccacgtgctggggcagaacctgcagccggcggctggcctccgtccagaggcagccaaggtggtgattctggtgacggacggcaagtcccaggacgatgtgcacactgctgcccgtgtcctcaaggacctgggcgtgaacgtcttcgctgtgggtgtgaagaacgccgatgaggctgagctgaggctcctggcgtccccgccgagggacatcaccgtccacagcgtgctggacttcctgcagctcggcgcgctggctggcctgctcagccgtctcatctgccagaggctccagggtgggagcccgcggcagggcccagcagcggctccagccctggacaccctccctgcccccaccagcctggtcctgagccaggtgacctcctccagcatccgcctgtcctggactccagccccccggcaccccctcaagtatctgatcgtttggcgagcctctagaggtggcacccccagggaggtggtggtggaggggcccgccgcctccacggagctgcacaacctggcctcccgcacagagtacctggtctccgtgttccccatctatgagggcggggttggcgaaggcctgcggggcctggtgaccacagcacctctgcctccgccccgggcgctgaccctggccgcagtgacgcccagaaccgtccacctcacctggcagccatcggccggggccacccactacctggtgcgatgttctcctgcttcccccaagggtgaagaggaggagcgagaggtgcaggtcgggcggcccgaggtgctgctggatggcctggaacctggcagggactatgaggtctcggtgcagagcctgcgaggccctgagggcagcgaggcccggggcatccgtgccaggacccccaccctggcccccccgagacacctgggcttctcagacgtgagccacgacgcggcacgagtgttctgggagggtgccccgaggcctgtgcgcctggtcagggtcacctatgtgtccagcgagggtggacactcggggcagacagaggctcctgggaacgccacctcggccacgctggggcctctctcttcctccaccacctacactgtccgtgtcacctgcctctaccctgggggtggctcctctacgctgactggccgggtgaccaccaagaaagctcccagcccaagccagctgtccatgacggagctgccaggggatgcagtccagctggcgtgggtggccgcagccccgtctggcgtgcttgtctaccagatcacgtggacgcccctgggagaggggaaggctcacgagatctctgtcccagggaacctcggcacggccgtcctgcctggcctagggaggcacacagagtacgacgtcaccatcttggcctactacagggacggggcccgcagtgaccctgtgtccctccgctataccccctccacggtgagcaggagcccaccctccaacctggccctggcctcggagacccccgacagcctgcaggtcagctggacgcccccgcttggccgcgtgctccattactggctcacctacgcccccgcctctggcttgggacccgagaaatccgtctctgtgccaggagccaggagccacgtgacactgcccgacctgcaggcagccacgaagtacagggtcctggtctcagctatctatgcagcaggcaggagtgaggctgtgtctgccacgggccagacagcctgcccagccctccgccctgacggctccctcccagggtttgacctgatggtggccttcagcctggtggaaaaggcttatgcgtccatccggggcgtggccatggagccctctgccttcggtgggaccccgaccttcacgctcttcaaggacgcccagctgacaagacgggtcagtgacgtctacccagcccccctacctccagagcacaccatcgtcttccttgtgcgcctacttcccgagacaccccgtgaggccttcgcgctgtggcagatgacagccaaggacttccagcccctccttggggttctgctggatgccgggaagaagtccctgacctacttccaccgtgaccccagggctgccttgcaggaggccaccttcgacccgcaggaagtgaggaagattttcttcgggagcttccacaaggtgcacgtggctgtgggccgctccaaggtcaggctctatgtggactgccggaaggtggctgagcggccccttggggagatgggcagcccacccgctgccggcttcgtcacgctggggaggctggccaaggccaggggccccaggagcagttcggccgcgtttcagctccagatgctgcagatcgtgtgcagtgacacctgggccgatgaggaccggtgctgtgagctccctgcctcgagggatggagagacctgccccgccttcgtgtctgcctgttcctgttcctcagagacccctgggcccccaggacctcaaggacccccaggcctccctgggaggaatggcaccccaggagagcagggcttcccagggcccaggggtccaccaggggtcaaaggagagaagggagaccatgggcttccaggcttgcagggccaccccggccaccagggcatccccgggagagttggcctccagggaccaaagggaatgagaggcctggagggaactgctggcctgcctggaccccctggccccagggggttccagggcatggcaggggccaggggcactagtggagagcgaggacctccagggaccgtggggcccacaggactgccagggcccaaaggggaacgaggagagaagggcgagcagcagtcccttgccaccctctaccagcttgtgagccaggcctcacacgtgtcaaagttcgactccttccacgagaacaccaggccccccatgcccatcttggagcagaagctggagccgggcactgagcccctggggtcacctggcacccgcagcaaggccctggttcctggagaatgggggcgtggtggccgccaccttgagggcagaggggagcctggagctgttggtcagatgggcagccctgggcagcagggggctagcacccagggcctctgggagtgacaggacattttctgcactgccccgaggaacgctgagccttcctccctgggtttgtctggacaccgagagcgaccacatcctggagaagccaggagaaaagctcaggaagagcctgcaggtggaaggagagggaagcagcggcctcggccaaggcccaccccatactcttggctctgtagcatttccaagttcagataaacccctgagtgctcacccaaaaaaaaaaaaaaaa

SEQ ID NO: 136 - DNA, 1637 bp, Homo sapiens
aagaactggcctgtacattttcaaggaattcttgagaggttcttggagagattctgggagccaaacactccattgggatcctagctgttttagagaacaacttgtaatggagccttcatctcttgagctgccggctgacacagtgcagcgcattgcggctgaactcaaatgccacccaacggatgagagggtggctctccacctagatgaggaagataagctgaggcacttcagggagtgcttttatattcccaaaatacaggatctgcctccagttgatttatcattagtgaataaagatgaaaatgccatctatttcttgggaaattctcttggccttcaaccaaaaatggttaaaacatatcttgaagaagaactagataagtgggccaaaatagcagcctatggtcatgaagtggggaagcgtccttggattacaggagatgagagtattgtaggccttatgaaggacattgtaggagccaatgagaaagaaatagccctaatgaatgctttgactgtaaatttacatcttctaatgttatcattttttaagcctacgccaaaacgatataaaattcttctagaagccaaagccttcccttctgatcattatgctattgagtcacaactacaacttcacggacttaacattgaagaaagtatgcggatgataaagccaagagagggggaagaaaccttaagaatagaggatatccttgaagtaattgagaaggaaggagactcaattgcagtgatcctgttcagtggggtgcatttttacactggacagcactttaatattcctgccatcacaaaagctggacaagcgaagggttgttatgttggctttgatctagcacatgcagttggaaatgttgaactctacttacatgactggggagttgattttgcctgctggtgttcctacaagtatttaaatgcaggagcaggaggaattgctggtgccttcattcatgaaaagcatgcccatacgattaaacctgcattagtgggatggtttggccatgaactcagcaccagatttaagatggataacaaactgcagttaatccctggggtctgtggattccgaatttcaaatcctcccattttgttggtctgttccttgcatgctagtttagagatctttaagcaagcgacaatgaaggcattgcggaaaaaatctgttttgctaactggctatctggaatacctgatcaagcataactatggcaaagataaagcagcaaccaagaaaccagttgtgaacataattactccgtctcatgtagaggagcgggggtgccagctaacaataacattttctgttccaaacaaagatgttttccaagaactagaaaaaagaggagtggtttgtgacaagcggaatccaaatggcattcgagtggctccagttcctctctataattctttccatgatgtttataaatttaccaatctgctcacttctatacttgactctgcagaaacaaaaaattagcagtgttttctagaacaacttaagcaaattatactgaaagctgctgtggttatttcagtattattcgatttttaattattgaaagtatgtcaccattgaccacatgtaactaacaataaataatataccttac

SEQ ID NO: 137 - DNA, 1661 bp, Homo sapiens
tgctgcagccgctgccgccgattccggatctcattgccacgcgcccccgacgaccgcccgacgtgcattcccgattccttttggttccaagtccaatatggcaactctaaaggatcagctgatttataatcttctaaaggaagaacagaccccccagaataagattacagttgttggggttggtgctgttggcatggcctgtgccatcagtatcttaatgaaggacttggcagatgaacttgctcttgttgatgtcatcgaagacaaattgaagggagagatgatggatctccaacatggcagccttttccttagaacaccaaagattgtctctggcaaagactataatgtaactgcaaactccaagctggtcattatcacggctggggcacgtcagcaagagggagaaagccgtcttaatttggtccagcgtaacgtgaacatatttaaattcatcattcctaatgttgtaaaatacagcccgaactgcaagttgcttattgtttcaaatccagtggatatcttgacctacgtggcttggaagataagtggttttcccaaaaaccgtgttattggaagtggttgcaatctggattcagcccgattccgttacctgatgggggaaaggctgggagttcacccattaagctgtcatgggtgggtccttggggaacatggagattccagtgtgcctgtatggagtggaatgaatgttgctggtgtctctctgaagactctgcacccagatttagggactgataaagataaggaacagtggaaagaggttcacaagcaggtggttgagagtgcttatgaggtgatcaaactcaaaggctacacatcctgggctattggactctctgtagcagatttggcagagagtataatgaagaatcttaggcgggtgcacccagtttccaccatgattaagggtctttacggaataaaggatgatgtcttccttagtgttccttgcattttgggacagaatggaatctcagaccttgtgaaggtgactctgacttctgaggaagaggcccgtttgaagaagagtgcagatacactttgggggatccaaaaggagctgcaattttaaagtcttctgatgtcatatcatttcactgtctaggctacaacaggattctaggtggaggttgtgcatgttgtcctttttatctgatctgtgattaaagcagtaatattttaagatggactgggaaaaacatcaactcctgaagttagaaataagaatggtttgtaaaatccacagctatatcctgatgctggatggtattaatcttgtgtagtcttcaactggttagtgtgaaatagttctgccacctctgacgcaccactgccaatgctgtacgtactgcatttgccccttgagccaggtggatgtttaccgtgtgttatataacttcctggctccttcactgaacatgcctagtccaacattttttcccagtgagtcacatcctgggatccagtgtataaatccaatatcatgtcttgtgcataattcttccaaaggatcttattttgtgaactatatcagtagtgtacattaccatataatgtaaaaagatctacatacaaacaatgcaaccaactatccaagtgttataccaactaaaacccccaataaaccttgaacagtg

SEQ ID NO: 138 - DNA, 2100 bp, Homo sapiens
ctgcccatccgtcccgccccctagacgcacgtccgctcgcccggcgcccgagccagtccgcgcgcacgccgtctgcgccccgaaagccccgccccaaggcgcgcccgcccaccgctctccacgtgctcgctggagggcggtgcgaggggccgagccgacaagatgttcttgctgcctcttccggctgcggggcgagtagtcgtccgacgtctggccgtgagacgtttcgggagccggagtctctccaccgcagacatgacgaagggccttgttttaggaatctattccaaagaaaaagaagatgatgtgccacagttcacaagtgcaggagagaattttgataaattgttagctggaaagctgagagagactttgaacatatctggaccacctctgaaggcagggaagactcgaaccttttatggtctgcatcaggacttccccagcgtggtgctagttggcctcggcaaaaaggcagctggaatcgacgaacaggaaaactggcatgaaggcaaagaaaacatcagagctgctgttgcagcggggtgcaggcagattcaagacctggagctctcgtctgtggaggtggatccctgtggagacgctcaggctgctgcggagggagcggtgcttggtctctatgaatacgatgacctaaagcaaaaaaagaagatggctgtgtcggcaaagctctatggaagtggggatcaggaggcctggcagaaaggagtcctgtttgcttctgggcagaacttggcacgccaattgatggagacgccagccaatgagatgacgccaaccagatttgctgaaattattgagaagaatctcaaaagtgctagtagtaaaaccgaggtccatatcagacccaagtcttggattgaggaacaggcaatgggatcattcctcagtgtggccaaaggatctgacgagcccccagtcttcttggaaattcactacaaaggcagccccaatgcaaacgaaccacccctggtgtttgttgggaaaggaattacctttgacagtggtggtatctccatcaaggcttctgcaaatatggacctcatgagggctgacatgggaggagctgcaactatatgctcagccatcgtgtctgctgcaaagcttaatttgcccattaatattataggtctggcccctctttgtgaaaatatgcccagcggcaaggccaacaagccgggggatgttgttagagccaaaaacgggaagaccatccaggttgataacactgatgctgaggggaggctcatactggctgatgcgctctgttacgcacacacgtttaacccgaaggtcatcctcaatgccgccaccttaacaggtgccatggatgtagctttgggatcaggtgccactggggtctttaccaattcatcctggctctggaacaaactcttcgaggccagcattgaaacaggggaccgtgtctggaggatgcctctcttcgaacattatacaagacaggttgtagattgccagcttgctgatgttaacaacattggaaaatacagatctgcaggagcatgtacagctgcagcattcctgaaagaattcgtaactcatcctaagtgggcacatttagacatagcaggcgtgatgaccaacaaagatgaagttccctatctacggaaaggcatgactgggaggcccacaaggactctcattgagttcttacttcgtttcagtcaagacaatgcttagttcagatactcaaaaatgtcttcactctgtcttaaattggacagttgaacttaaaaggtttttgaataaatggatgaaaatcttttaacggagacaaaggatggtatttaaaaatgtagaacacaatgaaatttgtatgccttgatttttttttcatttcacacaaagatttataaaggtaaagttaatatcttacttgataaggatttttaagatactctataaatgattaaaatttttagaacttcctaatcacttttcagagtatatgtttttcattgagaagcaaaattgtaactcagatttgtgatgctaggaacatgagcaaactgaaaattactatgcacttgtcagaaacaataaatgcaacttgttgtg

SEQ ID NO: 139 - DNA, 902 bp, Homo sapiens
cggattccggtccgcaggagaccgaaggcacagctccccgcgccgcgcacgccgcccgagcccggagtgcggacacccccgggatgcttgcgccccagaggacccgcgccccaagcccccgcgccgcccccaggcccacccggagcatgctgcctgcagccatgaagggcctcggcctggcgctgctggccgtcctgctgtgctcggcgcccgctcatggcctgtggtgccaggactgcaccctgaccaccaactccagccattgcaccccaaagcagtgccagccgtccgacacggtgtgtgccagtgtccgaatcaccgatcccagcagcagcaggaaggatcactcggtgaacaagatgtgtgcctcctcctgtgacttcgttaagcgacactttttctcagactatctgatggggtttattaactctgggatcttaaaggtcgacgtggactgctgcgagaaggatttgtgcaatggggcggcaggggcagggcacagcccctgggccctggccggggggctcctgctcagcctggggcctgccctcctctgggctgggccctgatgtctcctccttcccacggggcttctgagcttgctcccctgagcctgtggctgccctctccccagcctggcgtggctggggctgggggcagccttggcccagctccgtggctgtggcctgtggctctcactcctcccccgacgtgaagcctccctgtctctccgccagctctgagtcccaggcagctggacatctccaggaaaccaggccatctgggcaggaggcctggggatgagggtggggggggacccccaggtcccggaggggaagtgaagcaacagcccagctggaagggcgtcttctgcggagaaataaagtcacttttgagtcctg

SEQ ID NO: 140 - DNA, 2883 bp, Homo sapiens
ccgggtgggctccaggcggccggtccccggcctccccccatggccaccgccccctcttatcccgccgggctccctggctctcccgggccggggtctcctccgccccccggcggcctagagctgcagtcgccgccaccgctactgccccagatcccggccccgggttccggggtctcctttcacatccagatcgggctgacccgcgagttcgtgctgttgcccgccgcctccgagctggctcatgtgaagcagctggcctgttccatcgtggaccagaagttccctgagtgtggcttctacggcctttacgacaagatcctgcttttcaaacatgaccccacgtcggccaacctcctgcagctggtgcgctcgtccggagacatccaggagggcgacctggtggaggtggtgctgtcggcctcggccaccttcgaggacttccagatccgcccgcacgccctcacggtgcactcctatcgggcgcctgccttctgtgatcactgcggggagatgctcttcggcctagtgcgccagggcctcaagtgcgatggctgcgggctgaactaccacaagcgctgtgccttcagcatccccaacaactgtagtggggcccgcaaacggcgcctgtcatccacgtctctggccagtggccactcggtgcgcctcggcacctccgagtccctgccctgcacggctgaagagctgagccgtagcaccaccgaactcctgcctcgccgtcccccgtcatcctcttcctcctcttctgcctcatcgtatacgggccgccccattgagctggacaagatgctgctctccaaggtcaaggtgccgcacaccttcctcatccacagctatacacggcccaccgtttgccaggcttgcaagaaactcctcaagggcctcttccggcagggcctgcaatgcaaagactgcaagtttaactgtcacaaacgctgcgccacccgcgtccctaatgactgcctgggggaggcccttatcaatggagatgtgccgatggaggaggccaccgatttcagcgaggctgacaagagcgccctcatggatgagtcagaggactccggtgtcatccctggctcccactcagagaatgcgctccacgccagtgaggaggaggaaggcgagggaggcaaggcccagagctccctggggtacatccccctaatgagggtggtgcaatcggtgcgacacacgacgcggaaatccagcaccacgctgcgggagggttgggtggttcattacagcaacaaggacacgctgagaaagcggcactattggcgcctggactgcaagtgtatcacgctcttccagaacaacacgaccaacagatactataaggaaattccgctgtcagaaatcctcacggtggagtccgcccagaacttcagccttgtgccgccgggcaccaacccacactgctttgagatcgtcactgccaatgccacctacttcgtgggcgagatgcctggcgggactccgggtgggccaagtgggcagggggctgaggccgcccggggctgggagacagccatccgccaggccctgatgcccgtcatccttcaggacgcacccagcgccccaggccacgcgccccacagacaagcttctctgagcatctctgtgtccaacagtcagatccaagagaatgtggacattgccactgtctaccagatcttccctgacgaagtgctgggctcagggcagtttggagtggtctatggaggaaaacaccggaagacaggccgggacgtggcagttaaggtcattgacaaactgcgcttccctaccaagcaggagagccagctccggaatgaagtggccattctgcagagcctgcggcatcccgggatcgtgaacctggagtgcatgttcgagacgcctgagaaagtgtttgtggtgatggagaagctgcatggggacatgttggagatgatcctgtccagtgagaagggccggctgcctgagcgcctcaccaagttcctcatcacccagatcctggtggctttgagacaccttcacttcaagaacattgtccactgtgacttgaaaccagaaaacgtgttgctggcatcagcagacccatttcctcaggtgaagctgtgtgactttggctttgctcgcatcatcggcgagaagtcgttccgccgctcagtggtgggcacgccggcctacctggcacccgaggtgctgctcaaccagggctacaaccgctcgctggacatgtggtcagtgggcgtgatcatgtacgtcagcctcagcggcaccttccctttcaacgaggatgaggacatcaatgaccagatccagaacgccgccttcatgtacccggccagcccctggagccacatctcagctggagccattgacctcatcaacaacctgctgcaggtgaagatgcgcaaacgctacagcgtggacaaatctctcagccacccctggttacaggagtaccagacgtggctggacctccgagagctggaggggaagatgggagagcgatacatcacgcatgagagtgacgacgcgcgctgggagcagtttgcagcagagcatccgctgcctgggtctgggctgcccacggacagggatctcggtggggcctgtccaccacaggaccacgacatgcaggggctggcggagcgcatcagtgttctctgaggtcctgtgccctcgtccagctgctgccctccacagcggttcttcacaggatcccagcaatgaactgttctagggaaagtggcttcctgcccaaactggatgggacacgtggggagtggggtggggggagctatttccaaggcccctccctgtttccccagcaattaaaacggactcatctctggccccatggccttgatctcagca

SEQ ID NO: 141 - DNA, 3116 bp, Homo sapiens
agcgctcagatacgcgacgcgtagcaggcggggaccgaacgggtgcctcagtgtccttcccctcccctcgcctggcctcgccgtcctctccccgcagccggaccggaactatgtgatcccggaagttccggggcctttgctgtgtgggataaacagtaatggcggaggctgcaactcccggaacaacagccacaacatcaggagcaggagcggcagcggcgacggcggcagcagcctcccccaccccgatccccacagtcaccgccccgtccctgggggcgggcggagggggcggcggcagcgacggcagcggcggcggctggactaaacaggtcacctgcaggtattttatgcatggggtttgtaaggaaggagacaactgtcgctactcgcatgacctctctgacagtccgtatagtgtagtgtgcaagtattttcagcgagggtactgtatttatggagaccgctgcagatatgaacatagcaaaccattgaaacaggaagaagcaactgctacagagctaactacaaagtcatcccttgctgcttcctcaagtctctcatcgatagttggaccacttgttgaaatgaatacaggcgaagctgagtcaagaaattcaaactttgcaactgtaggagcaggttcagaggactgggtgaatgctattgagtttgttcctgggcaaccctactgtggccgtactgcgccttcctgcactgaagcacccctgcagggctcagtgaccaaggaagaatcagagaaagagcaaaccgccgtggagacaaagaagcagctgtgcccctatgctgcagtgggagagtgccgatacggggagaactgtgtgtatctccacggagattcttgtgacatgtgtgggctgcagctcctgcatccaatggatgctgcccagagatcgcagcatatcaaatcgtgcattgaggcccatgagaaggacatggagctctcatttgccgtgcagcgcagcaaggacatggtgtgtgggatctgcatggaggtggtctatgagaaagccaaccccagtgagcgccgcttcgggatcctctccaactgcaaccacacctactgtctcaagtgcattcgcaagtggaggagtgctaagcaatttgagagcaagatcataaagtcctgcccagaatgccggatcacatctaactttgtcattccaagtgagtactgggtggaggagaaagaagagaagcagaaactcattctgaaatacaaggaggcaatgagcaacaaggcgtgcaggtattttgatgaaggacgtgggagctgcccatttggagggaactgtttttacaagcatgcgtaccctgatggccgtagagaggagccacagagacagaaagtgggaacatcaagcagataccgggcccaacgaaggaaccacttctgggaactcattgaggaaagagagaacagcaacccctttgacaacgatgaagaagaggttgtcacctttgagctgggcgagatgttgcttatgcttttggctgcaggtggggacgacgaactaacagactctgaagatgagtgggacttgtttcatgatgagctggaagatttttatgacttggatctatagcaaccttgcgtggcgtgtgaactggtctgctgacctcagacagcagctgtcccctgtggtggtgtggcagtgcctgtgttctctcctaggcaggcctctcaactccaggtgctgtcctaagaatttttacccagggcctgtcttctcaacccctcacctttccctgaggagtgtgttgttttccctgttgaaaaaagttacaaaaataaatcttaaagttagttttttgtaacacgaatttaactgtcagacagttagtgtaggtgtgttgcgtcatctgttttcaaccagattgcatttatggacttttcacacactcattttgaggaccccaggttcaaaagtaaaagcagtggccctgctttggggtccaagaataggagtgatgggtgaagggacctaagctggccaatagccctctgccccagacatgggatgtggatccttgaggtttctggtgaaatctgcacatctgtgtttttatatctgttccctaccctgtaatccctaccacgtgcacttgttctgtggttttggtctcttgtttaattgcacacaagtaatactactgggtaaccagaatcaggtgtgaatgtgttgagattttttactgttttgcatgataggaaaattgagaaagaatacgtataaaagatagagaggcataacatcaatgcagagttggaagttggctcccaagggctgacatggtgtgagtgtgtgggtgtgtgataagcttctcatccctgcatagatgcagtattcttagccttagtagaaaaacctggtttagtggtttaagccttgtgtggcagatagatcttaaagggcaaagcagtatattggtagttgtcaatatagcagtgctagctctgtctatataaatagagaaatggggttagccatagaggttaaaactacctggttatcccatataataacacaaactgggtcttggatacacagttgtatttaatgttttacgatctagcctttccagtacaggcactttctgagaaacctttgtcctcacttgaggcattttgttgtcgggtttttgtgtttgtttttgtgggtatttgcctcattccacccctgagctttcaggtagacagacgtgattcaaaactctgttctaaggtgtttattgtagtggagtaatgggtttgcagtgataagtcatacttttccaccgaaagggagggcttgggaatccctgagattagctaaagttaagttgttggaagaattccttgattggaaattgtacctttgtgttttgttgctctgtttcctgaaaataactcggggatgctcctggtttgtccatctactgctttgattccttggatcccacccattctttcactttaagaaaaaacaaataattgttgcagaggtctctgtattttgcagctgcccttttgtaagaagcacttttcccaaataaaacaattaaaaaaaaaaaaaaaaaaaaaaaaaaaaaaaaaaaaaaaaaaaaaaaaaaaa

SEQ ID NO: 142 - DNA, 1321 bp, Homo sapiens
ggcgctgggcagtgtggaggtcgttggagtcacttccgcgtcaccagctcctgtgcctgccagtcggtgcccctcccgctccagccatgctctccgccctcgcccggcctgccagcgctgctctccgccgcagcttcagcacctcggcccagaacaatgctaaagtagctgtgctaggggcctctggaggcatcgggcagccactttcacttctcctgaagaacagccccttggtgagccgcctgaccctctatgatatcgcgcacacacccggagtggccgcagatctgagccacatcgagaccaaagccgctgtgaaaggctacctcggacctgaacagctgcctgactgcctgaaaggttgtgatgtggtagttattccggctggagtccccagaaagccaggcatgacccgggacgacctgttcaacaccaatgccacgattgtggccaccctgaccgctgcctgtgcccagcactgcccggaagccatgatctgcgtcattgccaatccggttaattccaccatccccatcacagcagaagttttcaagaagcatggagtgtacaaccccaacaaaatcttcggcgtgacgaccctggacatcgtcagagccaacacctttgttgcagagctgaagggtttggatccagctcgagtcaacgtccctgtcattggtggccatgctgggaagaccatcatccccctgatctctcagtgcacccccaaggtggactttccccaggaccagctgacagcactcactgggcggatccaggaggccggcacggaggtggtcaaggctaaagccggagcaggctctgccaccctctccatggcgtatgccggcgcccgctttgtcttctcccttgtggatgcaatgaatggaaaggaaggtgttgtggaatgttccttcgttaagtcacaggaaacggaatgtacctacttctccacaccgctgctgcttgggaaaaagggcatcgagaagaacctgggcatcggcaaagtctcctcttttgaggagaagatgatctcggatgccatccccgagctgaaggcctccatcaagaagggggaagatttcgtgaagaccctgaagtgagccgctgtgacgggtggccagtttccttaatttatgaaggcatcatgtcactgcaaagccgttgcagataaactttgtattttaatttgctttggtgatgattactgtattgacatcatcatgccttccaaattgtgggtggctctgtgggcgcatcaataaaagccgtccttgattttatttttcaaggtcccttctgtaaaaaaaaaaaaaaaaaa

SEQ ID NO: 143 - DNA, 5388 bp, Homo sapiens
gcaacagcggcggcggccgcggcggctggccggactcaggtgtttcggacgctattgcccttcgcgccagccgtcgagtgggcagcagcgggactcagccgggcgccaggttcctgccaggcagcgccgggaagcgcgggcggccgagaactccttcctgctacttcgcccagcgccgctgcttcggcttcccagcgaagtgggagaccttcctccctgtttgcagacgtccgtgggagacccttattttttccaccgctaaggttaagagattctggaatagaagcgtcgaaggagatcaagtgaaccttctacaactcctcggatgtcgccagtctccctttcggggcggaagactacgtttgagcatctcactgaggtgcaggaatggaagaacccaccttgcagcttttctgcagtgtggcttgcctgatctacccctaggaatgaagaggaggcttgtaataatccgatgaagtacagatgttgaagaggatatcgcaggacctaaacttgtgatcgtttgggggaggtcacacacgtttctgagtgggaatggatgggcgtgaatgacgtgccctcttaaaaagcacaacagtcctttaagaggagcaaaattgagttttcccattttggccaagattttgaagacagttcaatgtattctacatttgacataagatgagaactttctaaagtattctctccaagagcgtaaacgatgactaccccagccctgctgcccctctctggacgtaggataccacctctgaacctggggccgccttccttcccacatcacagggctaccttgagactttctgagaagtttattcttctccttattcttagtgccttcatcactctgtgttttggggcattctttttccttccagactcttcaaaacacaaacgctttgatttgggtttagaagatgtgttaattccacatgtagatgccggtaaaggggctaaaaaccccggagtcttcctgatccatggacccgatgaacatagacacagggaagaggaagaacgtctgagaaataaaattcgagctgatcatgagaaggccttggaagaagcaaaagaaaaattaagaaagtcaagagaggaaattcgagcagaaattcagacagagaaaaataaggtagtccaagaaatgaagataaaagagaacaagccactgccaccagtccctattcccaaccttgtaggaatacgtggtggagacccagaagataatgacataagagagaaaagggaaaaaattaaagagatgatgaaacatgcttgggataactataggacatatgggtggggacataatgaactcagacctattgcaaggaaaggacactcccctaacatatttggaagttcacaaatgggtgctaccatagtagatgctttggataccctttatatcatgggacttcatgatgaattcctagatgggcaaagatggattgaagacaaccttgatttcagtgtgaattcagaggtgtctgtgtttgaagtcaacattcgatttattggaggcctacttgcagcatattacctatcaggagaggagatattcaagattaaagcagtgcaattggctgagaaactccttcctgcctttaacacacctactgggattccttgggcaatggtgaatttgaaaagtggagtagggcgaaactggggctgggcatctgcaggtagcagcattctggctgaatttggtacactacatatggagttcatccacctcagctacttgacaggggacctgacttactacaaaaaggttatgcacattcggaaactacttcagaaaatggatcgtccaaatggtctttatccaaattatttgaaccccagaacagggcgctggggtcagtatcatacatctgtcggtggcctgggagacagtttttatgaatacttactgaaagcatggttgatgtcagataaaacagaccatgaggcaagaaagatgtatgatgatgctattgaggctatagaaaaacatcttattaagaagtctcgtggaggtcttacctttattggagaatggaagaatgggcacttggaaaaaaagatggggcatttggcctgctttgctgggggaatgtttgcactaggagcagatggttccagagcagataaagctggtcattatttagagctaggggcagaaattgcacgtacttgtcatgagtcatatgacagaactgcattaaagctaggtcctgaatcattcaagtttgatggtgcagtggaggctgtggctgtccggcaggctgaaaagtattatatcctccgtccagaagtaattgaaacctattggtacctatggcgattcactcacgatccaagatacaggcagtggggctgggaagcagcactggccattgaaaagtattgccgagttaatggtgggttttctggagtcaaagatgtatattcctctactcctacacatgatgatgtacagcagagcttttttcttgctgaaacattaaaatatttgtatctgctgttctccggtgatgaccttttacctttagaccactgggtgtttaatacagaggctcaccctctgcctgtgttacatttagccaacaccacactttcaggtaatcctgctgttcgatgaaagcagttccagaaggaccattctcacctgtgttttgtttacatggaccactacagaaattagtttgaaggggcggcttttgaaaacctggacctctatgtcaacatgacagggtgaaactattccccctaagactgttcaacttgtagatacatcaactttgaaattattccattttatacctgaccaaaacatgttctgatatgtgtaggacagagacctggatgtgctttgatcgttaatgaggtggtcacatgagaaatgatacctgttactactgtattgtttttagagtcctgaagtctggaggctagacttcctgaaagcaagtcaagaatatagagcaccttgcaggagttcaagatggcctttggaaccaattatgtatttgtttcctcctacagtggagcagcattcaaatcaaatatttacatattgcttatcactttttctccattttaataatggaatgaactaaaataaacaagaacaaaagaatagtataattatatcagtaacaagaagactcaaaaaagaaacaggagtacctatccctatctgaattttcaagttccccattggatgaccagactggcaaccatttcaaatcccagtctatttcattgaaatttcttggttaagtttaattttctctgggggcatgatctcacaaagaatactcaagtctttttcttcttatggaatcatcgaaactgctatttatcataatcaccacttatgagcctgggtttgggattttgtgcatgtagttcagtctagtgttggtagcatgacagaaagtggggaaaatgccgcagtttgttgccttgaaacctaagagcaatccttggttttgttgctacattatttttccagaccaacacatctaccaagtaaattttattcactttaatttcataataaagttagtagagtcactcaacttacaactttatttatgtggcttggcaaaaatcactataaggcagctctaaatttgccttgataagctaaataaattacttttataacttactaaagcagaacaaacagtgaaactttctaaaatattctatctggaatagggacaggggatcttttatttataatctcatcagatgagtgagttgttcacagatattttatgtttttttaattttctccaagaatatttatagaattccaaagaatcagaatagtttcaaaataattttcagtgataaaagagtgttgtaattaatcatattacactaaaattgggatacatctaaggaactttatcttactatcagtaggttttgcattgatatttctttttaaataaactactagttctttatattttgacaaaaagaacttaaattttatcaggaactgtaagataaatatctagtgcttataaattttctgtccttaaatttatgtgacagtgcaagatacttttgctcttttcatttaatataggcatcttccattgacattaataaaacttagaaacagtataattagtataacatttactctgaatttgaagatttcctgaaacaaagtttgtacaagaagcccaccttggaattctgaaggcttattttcttgtttgataagcttttcttttaaacttaggttttaagttggggaaagacttaattaactaatatagtattttctaaggttgatcatcttataccacgaatcgttaattttgacagttctactgatccgtaaatgataaccactgcaaattttttcagtataaaatttttcactgcaaaaaaatttcagtagaaaataaggatgcagggccagttacaatagtccttaagagagttaaattatagcacatgttttgacattgtaatatcttttactacttgaacatttaaatttctaaatgagaaaggtatatatattactgtaactgtagaagggaaaagggaaagtatttggttctaaaaaatgttagccttcctcgtaaaagtagcacaagcccacttatgaatcactgagaaaaagtgaaaaacttgagttggcaaagatgcagagcagcagtgcagatggcaatgaactctctgaattctcttttaccttatttagaagaatgcagagtaaagggaccttcttggttctgcaggaacttctcaagggatgaggagacagaacccctacttccaagtgctctatttgtattacccagatgactgaagcttaagagaaggcagggaagtatacaagcagagccagttctggtacaaacaaagaatttgacagggacaatggaagggtcttcttcaccactccttaccttctatgtgatggaaagactagagcttataaaagtacttccatttttttattctcctgaataccaaaggcaattaaagtcagctacaaatgacttgccagtgtcatgttttatttttgttatagatttttaaattatttccttcaagatcaattcttatcccatataatgcttagcttccaagaatattctttactttcttctgtcttttacagctctttgcattttgtagaccttaatactcaggttaaatattcattgcatttataagatcttctgcaaaaagcccagaaatggtccttttcaggtgcctcttcaaagagctgacaccttaccttgtgcctttggcacaaatgtgcagaatagatacatcagttggtgcataatcgaaaaaaataggaattttgaacactgttcttccttctacatttatttctct

SEQ ID NO: 144 - DNA, 9416 bp, Homo sapiens
aagcgcgccgcctccccgccctctctcactccccgctcctctccgccgcgcactctcgcggcgctgggagagggcggagggggaggcggcgcgcggcgccagaggaggggggacgcagggggcggagcggagacagtaccttcggagataatcctttctcctgccgcagtggagaggagcggccggagcgagacacttcgccgaggcacagcagccggcaggatggcgaccgtggtggtggaagccaccgagccggagccgtccggcagcatcgccaacccggcggcgtccacctcgcctagcctgtcgcaccgcttccttgacagcaagttctacttgctggtggtcgtcggcgagatcgtgaccgaggagcacctgcggcgtgccatcggcaacatcgagctcggaatccgatcatgggacacaaacctgattgaatgcaacttggaccaagaactcaaactttttgtatctcgacactctgcaagattctctcctgaagtcccaggacaaaagatccttcatcaccgaagtgacgttttagaaacagtggtcctgatcaacccttctgatgaagcagtcagcaccgaggtgcgcttaatgatcactgatgctgcccgacacaagctgctcgtgctgaccgggcagtgctttgaaaataccggagagctcattctccagtccggctctttctccttccagaacttcatagagattttcaccgatcaagagatcggggagttactaagcaccacccatcctgccaacaaagccagcttaaccctgttctgtcctgaagaaggggactggaagaactccaatcttgacagacacaatctccaagacttcatcaatattaaactcaattcagcttctatcttgccagaaatggaaggactttctgagtttaccgagtatctctcagaatcagtggaagtcccatctccctttgacatcttggaacctcccacatcgggtggatttctgaagctctccaagccctgctgttatatttttccaggagggaggggcgattctgccttgtttgcagtgaatggtttcaatatgctcatcaatggcggatcagagagaaaatcctgcttctggaagctcatccgacacttagaccgagtggactccatcctgctcacccacattggggatgacaatttgcctggaataaacagcatgttacagcggaaaattgcagagctcgaggaagaacagtcccagggctccaccacaaatagtgactggatgaaaaacctcatctcccctgacttaggagttgtatttctcaatgtacctgaaaatctcaaaaatccagagccaaacatcaagatgaagagaagcatagaagaagcctgcttcactctccagtacctaaacaaattgtccatgaaaccagaacctctgtttagaagtgtaggcaatactattgatcctgtcattcttttccaaaaaatgggagtaggtaaacttgagatgtatgtgcttaatccagtcaagagcagcaaggaaatgcagtattttatgcagcagtggactggtaccaacaaagacaaggctgaattcattctgcctaatggtcaagaagtagatctcccgatttcctacttaacttcagtctcatctttgattgtgtggcatccagcaaaccctgcggagaaaatcatccgagtcctgtttcctgggaacagcacccagtacaacatcctggaagggttggaaaagctcaaacatctagactttctgaagcagccactggccacccaaaaggatctcactggccaggtgcccactcctgtggtgaaacaaacaaaactgaaacagagggctgatagccgagaaagtctgaagccagccgcaaaaccacttcctagcaaatccgtgcgcaaggagtcaaaagaagaaacccctgaggtcacaaaagtgaatcacgtggaaaagccacccaaagttgaaagcaaagaaaaggtaatggtgaaaaaagacaagccagtaaaaacagagaccaaaccttcagtgactgaaaaggaggttcccagcaaagaagagccatctccagtgaaagccgaggtggctgagaagcaagccacagatgtcaaacccaaagctgccaaggagaagacggtgaaaaaggaaacaaaggtaaagcctgaagacaagaaagaggagaaagaaaagccaaagaaagaagtggctaaaaaggaggacaaaacacctatcaagaaggaggaaaaaccaaaaaaggaagaggtgaaaaaagaagtcaaaaaagagatcaagaaagaagagaaaaaagaacccaagaaagaggttaagaaagaaacaccgccaaaggaagtcaagaaggaagttaagaaggaagagaagaaggaagtgaaaaaggaagaaaaggaacccaaaaaagaaattaagaagctccctaaagacgcaaagaaatcatctactcctctgtctgaagcaaaaaaaccagctgctttaaaaccaaaagtacccaagaaggaagagtctgtcaagaaagattctgttgctgccggaaagccaaaggagaaggggaaaataaaagtcattaagaaggaaggcaaggccgcagaggctgtcgctgcagctgtcggcactggagccaccacagcagctgtcatggcggcagctggaatagcagccattggccctgccaaagaactcgaagctgagaggtcccttatgtcatctcctgaggatctaaccaaggactttgaagagttaaaggctgaagaggtcgatgtaacaaaggacatcaagcctcagctggagctaatcgaagacgaagagaaactgaaggaaactgagccagtcgaagcctacgtcatccagaaggagagagaagtcaccaaaggtcctgccgagtcccctgatgagggaatcactaccactgaaggggagggcgaatgtgaacagacacctgaggagctggagcccgtcgagaagcagggagtagacgacattgaaaaatttgaagatgaaggagccggttttgaagaatcttcagagactggagactatgaagagaaggcagaaactgaggaggctgaggagccagaagaggatggggaggaacacgtatgtgtgagcgcctccaagcacagccccactgaggatgaggaaagtgccaaggcggaggctgatgcatacatcagggagaagagggagtctgtggccagtggggatgaccgagccgaagaagacatggatgaggccattgagaaaggagaggctgaacaatctgaagaggaggctgatgaggaggacaaagctgaagatgccagagaggaggaatatgagccggaaaaaatggaagctgaagactatgtgatggctgtggtcgacaaggctgcagaggctggtggtgccgaggagcagtatggattcctcaccacaccaaccaagcaactaggagcccagtctcctggccgagaacctgcatcttcaattcatgatgagactttacctggaggctcagagagcgaggccaccgcttctgatgaggagaatcgagaagaccagcctgaggaattcactgccacctctggctacactcagtctactattgagatatccagtgagcccacccccatggatgagatgtctacccctcgagacgtgatgagtgatgagaccaacaatgaagagacggagtccccttctcaggaattcgtaaatatcaccaaatatgaatcttcattgtattctcaggaatactctaaacctgctgatgttacaccgctcaacggattttctgaaggatcaaaaacagatgccactgatggcaaggattacaatgcttcagcctctaccatatcaccaccctcttccatggaggaagacaaattcagcagatctgctttacgtgatgcttactgctctgaagtgaaagccagcaccactttggacatcaaagatagcatctcagctgtttcaagtgaaaaggtcagcccatcgaagagcccgtccctgagtccatctccaccatcacccttagaaaagacccccctgggtgaacgtagtgtgaacttctctctgacgcccaatgagattaaagtctctgcagaggcagaagtagccccggtgtctcctgaggtgacccaagaagtagttgaagaacattgtgctagtcctgaggacaagactctggaagtggtgtcaccatctcagtccgtgactggcagtgctggtcacacaccttactatcaatctcctactgacgagaaatccagtcatctccctacagaagtcattgaaaaaccaccagcagttccagtgagttttgaattcagtgatgccaaagatgagaatgaaagggcttcagtaagccccatggatgagcccgtgcctgactcagagtctcctattgaaaaagttttgtctcctttacgcagcccgcccctcattggatccgagtctgcttatgaaagttttctaagtgctgatgacaaggcttctggcagaggtgccgaaagtccttttgaagaaaagagtggaaaacaaggctctccagaccaagtaagtccagtttctgaaatgacttctactagtctttaccaagacaaacaggaagggaaaagcacagactttgcaccaataaaagaagactttggccaagaaaagaaaactgatgatgttgaagccatgagttctcaaccagcactggctctggatgaaaggaaattaggagatgtttctcccacacaaatagatgtcagtcagtttggatcttttaaagaagacactaagatgtccatttctgaaggtactgtctcagacaagtcagctactcctgttgatgagggcgtagcagaagacacgtactctcatatggagggtgtggcctcagtgtccacagcctcagtggctacgagctcatttccagagccaacaacagatgatgtgtctccatctctgcatgctgaggttggctccccacattccacagaagtagatgactccctttcagtgtctgttgtgcaaacacctaccacattccaggaaacagaaatgtctccatctaaagaagaatgcccaagaccgatgtcaatttctccaccagatttctcccctaaaactgcaaagtccaggacacccgttcaagatcacagatctgaacagtcctcaatgtctattgaatttggccaagaatctcctgagcaatcccttgctatggacttcagtcgacagtctccagatcaccctacagtgggtgcaggcgtgcttcacatcactgaaaatgggccaactgaagtggactacagtccttctgacatgcaggactccagtttatcacataagataccacctatggaggagccgtcctacacccaagataatgatctttctgagctcatctcagtatctcaggtagaggcctccccgtccacctcttctgctcataccccttctcagatcgcttctcctctccaagaagatactctatccgatgttgctcctcccagagatatgtccttatatgcctcactcacctctgaaaaagtgcaaagtctggaaggagagaagctctctccaaaatctgatatctctccactcaccccacgagagtcctctcctttatattcacctactttttcagattctacctctgcagtcaaagagaaaacagcaacttgccacagttcctcttctccaccaatagatgcagcatccgcagagccctatggcttccgtgcctcagtgttattcgatacaatgcaacaccatctagccttgaatagagatttgtccacacctggcctggagaaggacagtggagggaagacacctggtgactttagctatgcctatcaaaagcctgaggaaacaaccaggtccccagatgaagaagattatgactatgagtcttatgagaagaccacccggacctcagatgtgggtggctattactatgagaagatagagagaaccacaaaatctccaagtgacagtggctactcctatgagaccattgggaaaactaccaagacccctgaagatggtgactattcctatgaaattattgagaagaccacacggacccctgaagagggtgggtactcatatgacataagtgaaaagaccaccagcccccccgaagtgagtggttacagctatgaaaagactgagaggtctagaaggcttctggatgacatcagcaatggctatgatgactctgaggatggtggccacacacttggggaccccagctactcttatgaaaccactgagaaaattaccagtttccctgagtctgaaggttattcctatgagacatctacaaagacaacacgaacccctgatacttccacatactgttacgagactgcagagaaaatcactagaacccctcaggcatccacatattcctacgagacttcagacctatgctacactgcagaaaagaagtccccctcagaagcccgtcaggatgtcgatttatgcctcgtgtcctcttgtgaatacaagcaccccaagacagagctttcaccctctttcattaatcccaatcctcttgagtggtttgccagtgaagaacccactgaagaatctgaaaagcccctcactcaatcagggggagccccaccgcctccaggaggaaagcaacagggccgacagtgtgatgaaacccctcccacctcagtcagcgagtcagccccatcccagaccgactctgatgttcccccggagactgaagagtgcccctccatcacggccgatgccaatatcgactctgaagacgagtcggaaaccatccccacagacaaaactgtcacgtacaaacacatggacccacctccagctcccgtgcaagaccgcagcccttcgccacgccaccctgatgtgtccatggtggacccagaggccttggccattgagcagaacctgggcaaagctctaaagaaagatctgaaagagaagaccaaaaccaaaaagccaggtacaaagaccaagtcatcttcacctgtcaaaaagagtgatgggaagtctaagcccttggcagcttcaccaaaaccagcgggcttgaaagaatcctcggataaagtgtccagggtggcttctcctaagaagaaagaatctgtggaaaaggcagcaaaacccaccaccactcctgaggtcaaagctgcacgtggggaagagaaagacaaggagaccaagaatgctgccaatgcctctgcatccaagtcggccaagaccgccactgcaggaccaggaactaccaagacgaccaagtcatctgctgtgcccccaggcctccctgtgtatttggacctgtgctacattcctaaccacagcaatagtaagaatgttgatgtggaatttttcaagagagtgcggtcttcctactacgtggtgagtgggaatgaccctgctgctgaggagcccagccgggctgtcctggacgctttgttggaaggaaaggctcagtggggcagcaacatgcaggtgacactgatcccaactcatgactcagaagtgatgagggaatggtaccaggagacccatgagaaacagcaagatctcaacatcatggttttagcaagcagcagcacagtggttatgcaagatgaatccttccctgcatgcaagattgaactgtaaaaaccaaggccagccacaccacaggatctgaactttgtttccagaaattcttcaatttgaaatcaccttttctaaaaagtcaattcatctagttaagtcgctgaacaattacctgccaaatgctatactgtgtcatggtgatgcaagtcactaaatttctcagtttttgctgattgctaagggaaataacagtatttccacaatagggttcaaattcctgcaaaattacctaccccagttcatctctgctgaacatttggaaaccatgcactagccaacccaactgacttctgctaggtagaggcatttgtcttagagagagagagagcgcgggagagagtgagagagagtgagagcacaaagataacgcaggagagagagagagaaagaatgagaaagaaaaggaatgcaagagaaggagatgtaatgacagagagttctggtgagatacccagagagaaaaagagagagcagggtggggtaaggaggagaaaataaaccaacaattaggtctgcattttctcaggcagtaggcattctttagtctacataggcaaagttttccatttttgtcagtctgagtcatcaaaaagagtcttaattttctaaaacaagttggctagaagaaagtaaaaagaacaacacttgttatgagggcatgtgatattttcacatcttaattaagctccttcagtttgaaggctgcacactgacataatgtagtgagtgtagactggccatgcaagtggtttgggccccattcagaactctcagactctaaacacacaagtagattgatctaaggcatgctcccagcatttgtccacccacttagtccactctgagtcgattaacctgcatgcagcaacacccaagtccaccccaattaactgaagcaaataccaaagcagttgggagtacatatggtagacaatttgccttaggaagtgacttgaatgtacaaagatacttgatgcacttattttttaatgtgagacagcaagtttataaaacatccatataggattatagatacttaaaggaacacgtgggtgagcgtgtgtgggggtactagaagctgatctgattggtccaacagtttgatgctgagtcatgcgtgttgaatcccacttcagtgcacctgtggcctctcagtcaaacaagttgtgcctttcacagcttctttactactgcaagttcaagactgaaatggcttctatgatcagaactgggaaaacagtgaatcttatggtggaagaggttctcagcaagtgtacagtatttaccttcctttgtcttacattggctttttaaattttccattaatttcaacataattatgggaacaagtgtacagaagaattttttttttaagatatgtgagaacttttcatagatgaactttttaacaaatgttttcatttacaggaaattgcaaagaaaattctcaagtgatagtctttttttttaagtgtttcgtaagacaaaaattgaataatgttttttgaagttctggcaagattgaagtctgatattgcagtaatgatatttattaaaaacccataactaccaggaataatgatacctcccaccccttgattcccataacataaaagtgctacttgagagtgggggagaatggcatggtaggctacttttcagggccttgacaagtacatcacccagtggtatcctacatacttctttcaagatcttcaaccatgaggtaaaagagccaagttcaaagaaccctagcacaaatttgctttgggattttcttttctgga

SEQ ID NO: 145 - DNA, 3453 bp, Homo sapiens
acttttcgcgcgaaacctggttgttgctgtagtggcggagaggatcgtggtactgctatggcggaatcatcggaatccttcaccatggcatccagcccggcccagcgtcggcgaggcaatgatcctctcacctccagccctggccgaagctcccggcgtactgatgccctcacctccagccctggccgtgaccttccaccatttgaggatgagtccgaggggctcctaggcacagaggggcccctggaggaagaagaggatggagaggagctcattggagatggcatggaaagggactaccgcgccatcccagagctggacgcctatgaggccgagggactggctctggatgatgaggacgtagaggagctgacggccagtcagagggaggcagcagagcgggccatgcggcagcgtgaccgggaggctggccggggcctgggccgcatgcgccgtgggctcctgtatgacagcgatgaggaggacgaggagcgccctgcccgcaagcgccgccaggtggagcgggccacggaggacggcgaggaggacgaggagatgatcgagagcatcgagaacctggaggatctcaaaggccactctgtgcgcgagtgggtgagcatggcgggcccccggctggagatccaccaccgcttcaagaacttcctgcgcactcacgtcgacagccacggccacaacgtcttcaaggagcgcatcagcgacatgtgcaaagagaaccgtgagagcctggtggtgaactatgaggacttggcagccagggagcacgtgctggcctacttcctgcctgaggcaccggcggagctgctgcagatctttgatgaggctgccctggaggtggtactggccatgtaccccaagtacgaccgcatcaccaaccacatccatgtccgcatctcccacctgcctctggtggaggagctgcgctcgctgaggcagctgcatctgaaccagctgatccgcaccagtggggtggtgaccagctgcactggcgtcctgccccagctcagcatggtcaagtacaactgcaacaagtgcaatttcgtcctgggtcctttctgccagtcccagaaccaggaggtgaaaccaggctcctgtcctgagtgccagtcggccggcccctttgaggtcaacatggaggagaccatctatcagaactaccagcgtatccgaatccaggagagtccaggcaaagtggcggctggccggctgccccgctccaaggacgccattctcctcgcagatctggtggacagctgcaagccaggagacgagatagagctgactggcatctatcacaacaactatgatggctccctcaacactgccaatggcttccctgtctttgccactgtcatcctagccaaccacgtggccaagaaggacaacaaggttgctgtaggggaactgaccgatgaagatgtgaagatgatcactagcctctccaaggatcagcagatcggagagaagatctttgccagcattgctccttccatctatggtcatgaagacatcaagagaggcctggctctggccctgttcggaggggagcccaaaaacccaggtggcaagcacaaggtacgtggtgatatcaacgtgctcttgtgcggagaccctggcacagcgaagtcgcagtttctcaagtatattgagaaagtgtccagccgagccatcttcaccactggccagggggcgtcggctgtgggcctcacggcgtatgtccagcggcaccctgtcagcagggagtggaccttggaggctggggccctggttctggctgaccgaggagtgtgtctcattgatgaatttgacaagatgaatgaccaggacagaaccagcatccatgaggccatggagcaacagagcatctccatctcgaaggctggcatcgtcacctccctgcaggctcgctgcacggtcattgctgccgccaaccccataggagggcgctacgacccctcgctgactttctctgagaacgtggacctcacagagcccatcatctcacgctttgacatcctgtgtgtggtgagggacaccgtggacccagtccaggacgagatgctggcccgcttcgtggtgggcagccacgtcagacaccaccccagcaacaaggaggaggaggggctggccaatggcagcgctgctgagcccgccatgcccaacacgtatggcgtggagcccctgccccaggaggtcctgaagaagtacatcatctacgccaaggagagggtccacccgaagctcaaccagatggaccaggacaaggtggccaagatgtacagtgacctgaggaaagaatctatggcgacaggcagcatccccattacggtgcggcacatcgagtccatgatccgcatggcggaggcccacgcgcgcatccatctgcgggactatgtgatcgaagacgacgtcaacatggccatccgcgtgatgctggagagcttcatagacacacagaagttcagcgtcatgcgcagcatgcgcaagacttttgcccgctacctttcattccggcgtgacaacaatgagctgttgctcttcatactgaagcagttagtggcagagcaggtgacatatcagcgcaaccgctttggggcccagcaggacactattgaggtccctgagaaggacttggtggataaggctcgtcagatcaacatccacaacctctctgcattttatgacagtgagctcttcaggatgaacaagttcagccacgacctgaaaaggaaaatgatcctgcagcagttctgaggccctatgccatccataaggattccttgggattctggtttggggtggtcagtgccctctgtgctttatggacacaaaaccagagcacttgatgaactcggggtactagggtcagggcttatagcaggatgtctggctgcacctggcatgactgtttgtttctccaagcctgctttgtgcttctcacctttgggtgggatgccttgccagtgtgtcttacttggttgctgaacatcttgccacctccgagtgctttgtctccactcagtaccttggatcagagctgctgagttcaggatgcctgcgtgtggtttaggtgttagccttcttacatggatgtcaggagagctgctgccctcttggcgtgagttgcgtattcaggctgcttttgctgcctttggccagagagctggttgaagatgtttgtaatcgttttcagtctcctgcaggtttctgtgcccctgtggtggaagagggcacgacagtgccagcgcagcgttctgggctcctcagtcgcaggggtgggatgtgagtcatgcggattatccactcgccacagttatcagctgccattgctccctgtctgtttccccactctcttatttgtgcattcggtttggtttctgtagttttaatttttaataaagttgaataaaatataaaaaaaaaaaaaaaaaaaaa

SEQ ID NO: 146 - DNA, 4374 bp, Homo sapiens
gggcacgagccctgccatgtctcgccggaagcctgcgtcgggcggcctcgctgcctccagctcagcccctgcgaggcaagcggttttgagccgattcttccagtctacgggaagcctgaaatccacctcctcctccacaggtgcagccgaccaggtggaccctggcgctgcagcggccgcagcgcccccagcgcccgccttcccgccccagctgccgccgcacgtagctacagaaattgacagaagaaagaagagaccattggaaaatgatgggcctgttaaaaagaaagtaaagaaagtccaacaaaaggaaggaggaagtgatctgggaatgtctggcaactctgagccaaagaaatgtctgaggaccaggaatgtttcaaagtctctggaaaaattgaaagaattctgctgcgattctgcccttcctcaaagtagagtccagacagaatctctgcaggagagatttgcagttctgccaaaatgtactgattttgatgatatcagtcttctacacgcaaagaatgcagtttcttctgaagattcgaaacgtcaaattaatcaaaaggacacaacactttttgatctcagtcagtttggatcatcaaatacaagtcatgaaaatttacagaaaactgcttccaaatcagctaacaaacggtccaaaagcatctatacgccgctagaattacaatacatagaaatgaagcagcagcacaaagatgcagttttgtgtgtggaatgtggatataagtatagattctttggggaagatgcagagattgcagcccgagagctcaatatttattgccatttagatcacaactttatgacagcaagtatacctactcacagactgtttgttcatgtacgccgcctggtggcaaaaggatataaggtgggagttgtgaagcaaactgaaactgcagcattaaaggccattggagacaacagaagttcactcttttcccggaaattgactgccctttatacaaaatctacacttattggagaagatgtgaatcccctaatcaagctggatgatgctgtaaatgttgatgagataatgactgatacttctaccagctatcttctgtgcatctctgaaaataaggaaaatgttagggacaaaaaaaagggcaacatttttattggcattgtgggagtgcagcctgccacaggcgaggttgtgtttgatagtttccaggactctgcttctcgttcagagctagaaacccggatgtcaagcctgcagccagtagagctgctgcttccttcggccttgtccgagcaaacagaggcgctcatccacagagccacatctgttagtgtgcaggatgacagaattcgagtcgaaaggatggataacatttattttgaatacagccatgctttccaggcagttacagagttttatgcaaaagatacagttgacatcaaaggttctcaaattatttctggcattgttaacttagagaagcctgtgatttgctctttggctgccatcataaaatacctcaaagaattcaacttggaaaagatgctctccaaacctgagaattttaaacagctatcaagtaaaatggaatttatgacaattaatggaacaacattaaggaatctggaaatcctacagaatcagactgatatgaaaaccaaaggaagtttgctgtgggttttagaccacactaaaacttcatttgggagacggaagttaaagaagtgggtgacccagccactccttaaattaagggaaataaatgcccggcttgatgctgtatcggaagttctccattcagaatctagtgtgtttggtcagatagaaaatcatctacgtaaattgcccgacatagagaggggactctgtagcatttatcacaaaaaatgttctacccaagagttcttcttgattgtcaaaactttatatcacctaaagtcagaatttcaagcaataatacctgctgttaattcccacattcagtcagacttgctccggaccgttattttagaaattcctgaactcctcagtccagtggagcattacttaaagatactcaatgaacaagctgccaaagttggggataaaactgaattatttaaagacctttctgacttccctttaataaaaaagaggaaggatgaaattcaaggtgttattgacgagatccgaatgcatttgcaagaaatacgaaaaatactaaaaaatccttctgcacaatatgtgacagtatcaggacaggagtttatgatagaaataaagaactctgctgtatcttgtataccaactgattgggtaaaggttggaagcacaaaagctgtgagccgctttcactctccttttattgtagaaaattacagacatctgaatcagctccgggagcagctagtccttgactgcagtgctgaatggcttgattttctagagaaattcagtgaacattatcactccttgtgtaaagcagtgcatcacctagcaactgttgactgcattttctccctggccaaggtcgctaagcaaggagattactgcagaccaactgtacaagaagaaagaaaaattgtaataaaaaatggaaggcaccctgtgattgatgtgttgctgggagaacaggatcaatatgtcccaaataatacagatttatcagaggactcagagagagtaatgataattaccggaccaaacatgggtggaaagagctcctacataaaacaagttgcattgattaccatcatggctcagattggctcctatgttcctgcagaagaagcgacaattgggattgtggatggcattttcacaaggatgggtgctgcagacaatatatataaaggacggagtacatttatggaagaactgactgacacagcagaaataatcagaaaagcaacatcacagtccttggttatcttggatgaactaggaagagggacgagcactcatgatggaattgccattgcctatgctacacttgagtatttcatcagagatgtgaaatccttaaccctgtttgtcacccattatccgccagtttgtgaactagaaaaaaattactcacaccaggtggggaattaccacatgggattcttggtcagtgaggatgaaagcaaactggatccaggcgcagcagaacaagtccctgattttgtcaccttcctttaccaaataactagaggaattgcagcaaggagttatggattaaatgtggctaaactagcagatgttcctggagaaattttgaagaaagcagctcacaagtcaaaagagctggaaggattaataaatacgaaaagaaagagactcaagtattttgcaaagttatggacgatgcataatgcacaagacctgcagaagtggacagaggagttcaacatggaagaaacacagacttctcttcttcattaaaatgaagactacatttgtgaacaaaaaatggagaattaaaaataccaactgtacaaaataactctccagtaacagcctatctttgtgtgacatgtgagcataaaattatgaccatggtatattcctattggaaacagagaggtttttctgaagacagtctttttcaagtttctgtcttcctaacttttctacgtataaacactcttgaatagacttccactttgtaattagaaaattttatggacagtaagtccagtaaagccttaagtggcagaatataattcccaagcttttggagggtgatataaaaatttacttgatatttttatttgtttcagttcagataattggcaactgggtgaatctggcaggaatctatccattgaactaaaataattttattatgcaaccagtttatccaccaagaacataagaattttttataagtagaaagaattggccaggcatggtggctcatgcctgtaatcccagcactttgggaggccaaggtaggcagatcacctgaggtcaggagttcaagaccagcctggccaacatggcaaaaccccatctttactaaaaatataaagtacatctctactaaaaatacgaaaaaattagctgggcatggtggcgcacacctgtagtcccagctactccggaggctgaggcaggagaatctcttgaacctgggaggcggaggttgcaatgagccgagatcacgtcactgcactccagcttgggcaacagagcaagactccatctcaaaaaagaaaaaagaaaagaaatagaattatcaagcttttaaaaactagagcacagaaggaataaggtcatgaaatttaaaaggttaaatattgtcataggattaagcagtttaaagattgttggatgaaattatttgtcattcattcaagtaataaatatttaatgaatacttgctataaaaaaaaaaaaaaaaaaaaaaaaaa

SEQ ID NO: 147 - DNA, 3376 bp, Homo sapiens
tttggggctgagtttaataagcgagcgagcgagcaagcgagcgcggggggaaaaaggcagagaatgtccgccatctaccctccgctcctgggcgcgctctcattcatagcagcctcttcatgaattacagctgagggggggcggaggaggggggggtaccacacaacaccccagcaaacctccgggcccccaggcatggctagctcgtgttccgtgcaggtgaagctggagctggggcaccgcgcccaggtgaggaaaaaacccaccgtggagggcttcacccacgactggatggtgttcgtacgcggtccggagcacagtaacatacagcactttgtggagaaagtcgtcttccacttgcacgaaagctttcctaggccaaaaagagtgtgcaaagatccaccttacaaagtagaagaatctgggtatgctggtttcattttgccaattgaagtttattttaaaaacaaggaagaacctaggaaagtccgctttgattatgacttattcctgcatcttgaaggccatccaccagtgaatcacctccgctgtgaaaagctaactttcaacaaccccacagaggactttaggagaaagttgctgaaggcaggaggggaccctaataggagtattcataccagcagcagcagcagcagcagcagtagcagcagcagcagcagcagcagcagcagcagtagcagcagcagcagcagcagcagcagcagcagtagcagcagcagtagcagcagcagcagcagcagtagtaccagtttttcaaagcctcacaaattaatgaaggagcacaaggaaaaaccttctaaagactccagagaacataaaagtgccttcaaagaaccttccagggatcacaacaaatcttccaaagaatcctctaagaaacccaaagaaaataaaccactgaaagaagagaaaatagttcctaagatggccttcaaggaacctaaacccatgtcaaaagagccaaaaccagatagtaacttactcaccatcaccagtggacaagataagaaggctcctagtaaaaggccgcccatttcagattctgaagaactctcagccaaaaaaaggaaaaagagtagctcagaggctttatttaaaagtttttctagcgcaccaccactgatactcacttgttctgctgacaaaaaacagataaaagataaatctcatgtcaagatgggaaaggtcaaaattgaaagtgagacatcagagaagaagaaatcaacgttaccgccatttgatgatattgtggatcccaatgattcagatgtggaggagaatatatcctctaaatctgattctgaacaacccagtcctgccagctccagctccagctccagctccagcttcacaccatcccagaccaggcaacaaggtcctttgaggtctataatgaaagatctgcattctgatgacaatgaggaggaatcagatgaagtggaggataacgacaatgactctgaaatggagaggcctgtaaatagaggaggcagccgaagtcgcagagttagcttaagtgatggcagcgatagtgaaagcagttctgcttcttcacccctacatcacgaacctccaccacccttactaaaaaccaacaacaaccagattcttgaagtgaaaagtccaataaagcaaagcaaatcagataagcaaataaagaatggtgaatgtgacaaggcatacctagatgaactggtagagcttcacagaaggttaatgacattgagagaaagacacattctgcagcagatcgtgaaccttatagaagaaactggacactttcatatcacaaacacaacatttgattttgatctttgctcgctggacaaaaccacagtccgtaaactacagagttacctggaaacatctggaacatcctgaggatataacaactggatgcatcaagaactattgtgttttttttttttggttttttttttttttggttgtgattttttgttcttgttgtttatatgaaaacactcaaaatgatgcaaccaaaagggaaaaaataaaaatcaaacaaccttcagctttatttttctttaaagccagtcatcatctcttgataaaggagaggttaaagcaaaccagcctcagcggaccactcttctctccaaggaaatccccgggaagagttagcctggatagccttgaaaacaaacaaatcaaacacaacacaagaaaactcaaagaatgtgtatggtatcatgtatctctctgtggtggttcattccacaggacgaatgcatattcaacacactgccttattacataactgatctatttattatcgcatacagatattctaagtcgttgagggaatgacaccatcagacattataagtacttggtcccgtggatgctctttcaatgcagcacccttgccatcccaagcccagtgaccttactcgtataccgtgccactttccaccaactttttccaagtcctttaactcgttgcagtctgtattttccaccttttgtttttccagttccaggacacagattatcaactggggggaccaaatagccaccttgattttcttctttgtggtctttttcctgaaagttggggcccagtccttggctgtatccatgtaatgatcttggaccatggtagaaaatgcaccaaataggatcatatgaattgctgtctagccttagtcaataaacttgtaggacttttaaacaaaagtgtacctgtaaatgtcctgaatccagcattgttgagctgtcatcaacattcttgtgtctgttttactgttacaatattaggtgaatatggaagtaaaggcattccacaggatcatcatttaaaaaaaaagaattctggtcctgttttctaaaaaaaaaaaactgttgtagaaattcttaatttggatctatttattagtcagagtttcagctttcttcagctgccagtgtgttactcatctttatcctaaaaatctggaatcagagatttttgtttgttcacatatgattctcttagacacttttatatttgaaaaaattaaaatctttctttggggaaaaattcttggttattctgccataacagattatgtattaacttgtagattcagtggttcaatacctgtttagttgcttgctaatatttccagaaggatttcttgtattggtgaaagacggttggggatggggggatttttttgttcttgttgtacccttgttttgaaactagaaatctgtcctgtggcatgcaaaagaaagcaaattatttttaaaagaaaaaaaccaaagtacttttggtgtcattattccatcttctccataagtggagaaatgaaaagtaagaacagctcatcttcaaagtttttactagaaattc

SEQ ID NO: 148 - DNA, 634 bp, Homo sapiens
gagttcaaggaggccttccagctgtttgaccgaacaggtgatggcaagatcctgtacagccagtgtggggatgtgatgagggccctgggccagaaccctaccaacgccgaggtgctcaaggtcctggggaaccccaagagtgatgagatgaatgtgaaggtgctggactttgagcactttctgcccatgctgcagacagtggccaagaacaaggaccagggcacctatgaggattatgtcgaaggacttcgggtgtttgacaaggaaggaaatggcaccgtcatgggtgctgaaatccggcatgttcttgtcacactgggtgagaagatgacagaggaagaagtagagatgctggtggcagggcatgaggacagcaatggttgtatcaactatgaagcgtttgtgaggcatatcctgtcggggtgacgggcccatggggcggagctcgtccgcatggtgctgaatggctgaggaccttcccagtctccccagagtccgtgcctttccctgtgtgaattttgtatctagcctaaagtttccctaggctttcttgtctcagcaactttcccatcttgtctctcttggatgatgtttgccgtcagcattcaccaaataaacttgctctctgggcctc

SEQ ID NO: 149 - DNA, 1170 bp, Homo sapiens
agagtagaggcggcggcggcggcggccggacccagactggtagtgaggctttggaccccgagccgctgcaatgccgctggagctggagctgtgtcccgggcgctgggtgggcgggcaacacccgtgcttcatcattgccgagatcggccagaaccaccagggcgacctggacgtagccaagcgcatgatccgcatggccaaggagtgtggggctgattgtgctaagttccagaagagtgagctagaattcaagtttaatcggaaagccttggagaggccatacacctcgaagcattcctgggggaagacgtacggggagcacaaacgacatctggagttcagccatgaccagtacagggagctgcagaggtacgccgaggaggttgggatcttcttcactgcctctggcatggatgagatggcagttgaattcctgcatgaactgaatgttccatttttcaaagttggatctggagacactaataattttccttatctggaaaagacagccaaaaaaggtcgcccaatggtgatctccagtgggatgcagtcaatggacaccatgaagcaagtttatcagatcgtgaagcccctcaaccccaacttctgcttcttgcagtgtaccagcgcatacccgctccagcctgaggacgtcaacctgcgggtcatctcggaatatcagaagctctttcctgacattcccatagggtattctgggcatgaaacaggcatagcgatatctgtggccgcagtggctctgggggccaaggtgttggaacgtcacataactttggacaagacctggaaggggagtgaccactcggcctcgctggagcctggagaactggccgagctggtgcggtcagtgcgtcttgtggagcgtgccctgggctccccaaccaagcagctgctgccctgtgagatggcctgcaatgagaagctgggcaagtctgtggtggccaaagtgaaaattccggaaggcaccattctaacaatggacatgctcaccgtgaaggtgggtgagcccaaaggctatcctcctgaagacatctttaatctagtgggcaagaaggtcctggtcactgttgaagaggatgacaccatcatggaagaattggtagataatcatggcaaaaaaatcaagtcttaaaaataaagtgccattctctg

SEQ ID NO: 150 - DNA, 2341 bp, Homo sapiens
ggctcttctttgcctctgctggagtccggggagtggcgttggctgctagagcgatgccgggccggagttgcgtcgccttagtcctcctggctgccgccgtcagctgtgccgtcgcgcagcacgcgccgccgtggacagaggactgcagaaaatcaacctatcctccttcaggaccaacgtacagaggtgcagttccatggtacaccataaatcttgacttaccaccctacaaaagatggcatgaattgatgcttgacaaggcaccaatgctaaaggttatagtgaattctctgaagaatatgataaatacattcgtgccaagtggaaaagttatgcaggtggtggatgaaaaattgcctggcctacttggcaactttcctggcccttttgaagaggaaatgaagggtattgccgctgttactgatatacctttaggagagattatttcattcaatattttttatgaattatttaccatttgtacttcaatagtagcagaagacaaaaaaggtcatctaatacatgggagaaacatggattttggagtatttcttgggtggaacataaataatgatacctgggtcataactgagcaactaaaacctttaacagtgaatttggatttccaaagaaacaacaaaactgtcttcaaggcttcaagctttgctggctatgtgggcatgttaacaggattcaaaccaggactgttcagtcttacactgaatgaacgtttcagtataaatggtggttatctgggtattctagaatggattctgggaaagaaagatgccatgtggatagggttcctcactagaacagttctggaaaatagcacaagttatgaagaagccaagaatttattgaccaagaccaagatattggccccagcctactttatcctgggaggcaaccagtctggggaaggttgtgtgattacacgagacagaaaggaatcattggatgtatatgaactcgatgctaagcagggtagatggtatgtggtacaaacaaattatgaccgttggaaacatcccttcttccttgatgatcgcagaacgcctgcaaagatgtgtctgaaccgcaccagccaagagaatatctcatttgaaaccatgtatgatgtcctgtcaacaaaacctgtcctcaacaagctgaccgtatacacaaccttgatagatgttaccaaaggtcaattcgaaacttacctgcgggactgccctgacccttgtataggttggtgagcacacgtctggcctacagaatgcggcctctgagacatgaagacaccatctccatgtgaccgaacactgcagctgtctgaccttccaaagactaagactcgcggcaggttctctttgagtcaaaagcttgtcttcgtccatctgttgacaaatgacagacctttttttttcccccatcagttgatttttcttatttacagataacttctttaggggaagtaaaacagtcatctagaattcactgagttttgtttcactttgacatttggggatctggtgggcagtcgaaccatggtgaactccacctccgtggaataaatggagattcagcgtgggtgttgaatccagcacgtctgtgtgagtaacgggacagtaaacactccacattcttcagtttttcacttctacctacatatttgtatgtttttctgtataacagccttttccttctggttctaactgctgttaaaattaatatatcattatctttgctgttattgacagcgatataattttattacatatgattagagggatgagacagacattcacctgtatatttcttttaatgggcacaaaatgggcccttgcctctaaatagcactttttggggttcaagaagtaatcagtatgcaaagcaatcttttatacaataattgaagtgttccctttttcataattactgtacttcccagtaaccctaaggaagttgctaacttaaaaaactgcatcccacgttctgttaatttagtaaataaacaagtcaaagacttgtggaaaataggaagtgaacccatattttaaattctcataagtagcattcatgtaataaacaggtttttagtttgttcttcagattgatagggagttttaaagaaattttagtagttactaaaattatgttactgtatttttcagaaatcaaactgcttatgaaaagtactaatagaacttgttaacctttctaaccttcacgattaactgtgaaatgtacgtcatttgtgcaagaccgtttgtccacttcattttgtataatcacagttgtgttcctgacactcaataaacagtcattggaaagagtgccagtcagcagtcatgca

SEQ ID NO: 151 - DNA, 509 bp, Homo sapiens
cgccggggaagcgaagtaggcaggggcgaggcggctggggaccgcggggcggacgggagcgagtatgtccgctctgactcggctggcgtctttcgctcgcgttggaggccgccttttcagaagcggctgcgcacggactgctggagatggtggagtccgtcatgccggtggtggtgtgcacattgagccccggtatagacagttcccccagctgaccagatcccaggtgttccagagcgagttcttcagcggactcatgtggttctggattctctggcgcttttggcatgactcagaagaggtgctgggtcactttccgtatcctgatccttcccagtggacagatgaagaattaggtatccctcctgatgatgaagactgaaggtgtagactcagcctcactctgtacaagagccaggtgagaatttcaaggattatcgacttcatattgcacattaaagttacaaattaaagtggcttggtcaagaatgagaaaaaaaaaaaaaaaa

SEQ ID NO: 152 - DNA, 1088 bp, Homo sapiens
ctcccttcttcctcctgcccgtagtagccatggcggccatgagtttgttgcggcgggtttcggttactgcggtggcagctctgtctggccggccccttggcactcgcctcggatttgggggcttcctcactcgtggctttccgaaggctgctgctcctgttcgacacagtggagaccatgggaaaagactatttgtcatcagaccttctagattctatgacaggcgttttttgaagttattgagattctacattgcattgactgggattccagtagcaattttcataactctggtgaatgtattcattggtcaagctgaactagcagaaattccagaaggctatgtcccagaacactgggaatattataagcatcccatatcaagatggattgcccgtaatttctatgatagtcctgaaaagatatatgaaagaacaatggccgtccttcagattgaagctgaaaaggctgaattacgggtaaaggagctggaagtgcgaaaattgatgcatgtgagaggagatggaccctggtattactatgagacaattgacaaggaacttattgatcattctccgaaagcaactcctgacaattaagcatttttttctccaaatacaaagtatattctctttattggaaaataaattaataaatatattctgtatttttgctctccgtgaaaaacaaaagagcctctgacattactgtctctcagtgttggttcagattgaggcttttgtttgaggagtttggcttccagtccccaaagaaggtttaaaatgtactaataaaaactggagaaataggaatttgtgaactcctaaaattgtagcaactttgaaaggttagtgttttatttacctgacaaatggaagttatagaagtctaataatgttaagcaccagtaattatagtattttgtacaaatgcctgtactgtagatgtctgtattattgaggggcaactcaggattttaagttccataaagtattgaaccaactctaaaatgttaactccttaataaacagattctcagtaaacaaattttaaagtttaaaaaaaaaaaaaaaaaaaaaaaaaaaaaa

SEQ ID NO: 153 - DNA, 668 bp, Homo sapiens
gcagcaagatggcggcggtctcaatgtcagtggtactgaggcagacgttgtggcggagaagggcagtggctgtagctgccctttccgtttccagggttccgaccaggtcgttgaggacttccacatggagattggcacaggaccagactcaagacacacaactcataacagttgatgaaaaattggatatcactactttaactggcgttccagaagagcatataaaaactagaaaagtcaggatctttgttcctgctcgcaataacatgcagtctggagtaaacaacacaaagaaatggaagatggagtttgataccagggagcgatgggaaaatcctttgatgggttgggcatcaacggctgatcccttatccaacatggttctaaccttcagtactaaagaagatgcagtttcctttgcagaaaaaaatggatggagctatgacattgaagagaggaaggttccaaaacccaagtccaagtcttatggtgcaaacttttcttggaacaaaagaacaagagtatccacaaaataggttggcactgactatatctctgcttgactgtgaataaagtcagctatgcagtatttatagtccatgtataataaatacatctcttaatctcctaataaattggacctttaaactacaaaaaaaaaaaaaaaa

SEQ ID NO: 154 - DNA, 2134 bp, Homo sapiens
gcacgagcgccggttcagcgcagcccggagtcgcccaggcctgaactcctacccaggtccccggcccccgccccgggcccgcgaggacaccggaggccaccccccgggggtggggagcggagccgcggcctagactcaagtctgggtttcagctgccgccagccctattgctgctgttgctgttctctgtccttggcccaggggctggaggccttttcctgactgattactccacctgctcaccccgcaagctgagtcctttccgctcctttgccagcaccgagctcttccacttccatgttcctgaggacacattcctggctgtttggaacctcatcatcttcaaggagcaagggggaacttttggggaccactgcccagaccaaagtgtgactgtgtatttccggtccggggcaccccctgtcatcaatcccctgcatacacacttcccaggggacacagctgtgcctggggttttctcactgaccctcagctggacactgcccaaccgcacctcaggcatctttaacgtcagcagccccttacctggggactggttcttggctgcccaccttccccaggcccacggccacatctctgtcaagggtctccaggatgagtgtcagtacctccttcagccgcagctgattgtccggcgtttgctggacgtcgctgtgctggttcctggccggccctcagagcaaaccctctccccacacaatcgctcagccctgtacaaggtctttgtgcccagcttcacttacagggtttcagcacagctggtgtgtgtggggggccgtggggtatctgcctgccccctgtcactgcgtctgcgtcccaaagccccacccctgcacaactcaagctctgtggcctgtggaggtgcctcaggatgccagctggagctggcactgcccccctgggggcactgggtctacgtgcgtgtggaaacatcatcccggggccctggtaggaccatccgcttccagctgtgtgtgcagttgcaagagtgcccacagcccggcctgctccgagccctggtccctggagctgccatgaacatgccccagtccctgggcaaccagccactgcccccagaaccgccatcccttggaacccctgcggaggggcctgggaccacgtccccacccgagcactgctggccagtgcgcccgactctgcgcaacgagctggacaccttctctgtccacttctacatcttctttggcccaagtgtggcccttccccctgagcgcccagccgtgttcgccatgaggctgttgccagtgctggacagtggaggcgtcctcagcctggagctccagctcaatgcgagctccgtgcgccaggaaaacgtgacggtgtttggatgcttgactcacgaggtgcccttgagcctgggggatgcagcagtgacctgttccaaagagtccctggccggcttcctcctctctgtcagtgccaccaccagggttgccaggctgcgaatcccattcccgcagacggggacctggttcctggccctccgctccctgtgcggggtggggcctcggttcgtgcggtgccgcaacgcgacggccgaggtgcggatgcgcaccttcctgtccccatgcgtggacgactgcgggccctacggccagtgcaagctgctgcgcacacacaattatctgtacgcagcctgcgagtgcaaggccgggtggagaggctggggctgcaccgacagtgcagatgcgctcacctatggattccagctgctgtccacactcctgctctgcctgagcaacctcatgtttctgccacctgtggtcctggccattcggagtcgatatgtgctggaagctgcagtctacaccttcaccatgttcttctccacggtatgcggtggtgtctgcatcttatcactgggtgcttgtgcatggtggtgggtcacagtctgtatttccaccacgttctccgagggtttgggaatgtctgtgccttcactgtgtcttctacagacagagacagcagtgcttcccaaactgtcatgcatagataatggtcatttttgtaagacacattggagtaaatgaacaaaactgtttgcaacttaataaagtaagtttgggcctccaaaaaaaaaaaaaaaaaaaaa

SEQ ID NO: 155 - DNA, 605 bp, Homo sapiens
gaagtggcccttgcaggcaagagtgctggagggcggcagcggcgaccggagcggtaggagcagcaatttatccgtgtgcagccccaaactggaaagaagatgctaattaaagtgaagacgctgaccggaaaggagattgagattgacattgaacctacagacaaggtggagcgaatcaaggagcgtgtggaggagaaagagggaatccccccacaacagcagaggctcatctacagtggcaagcagatgaatgatgagaagacagcagctgattacaagattttaggtggttcagtccttcacctggtgttggctctgagaggaggaggtggtcttaggcagtgatggaccctccattttacctctttaccctgtcgctcataatgaggcatcatatatcctctcactctctgggacaccatagccactgccccctcccctggatgcccagtaatgtatgtctactggtgggagactgtgaggatcccaggattcagtattcctggcccagagggccttgctggctactgggtgttagtttgcagtcctgtgtgcttccctctcttatgactgtgtccctggttgtcaataaaatatttcctggc

SEQ ID NO: 156 - DNA, 3236 bp, Homo sapiens
ctccaccgcggcgagaggcatgggcacgtggctgccgagggtggccgagctctgggaagaaaagcccgtgtgcctctgcatagcgtcgctacagcgctgactcggtgtggattgattggaaaggtttgagggagtacttgggaagcatggtggcacatgatgagactggaggtctcctacctattaaaaggaccatacgagtcctagatgtcaataaccagtccttcagagaacaagaggagccaagcaataaaagagttcgacctctggctcgtgtcacgtccttggcaaatttaatctctcctgtaagaaatggagctgtcagacgttttggtcaaacaatacagtcatttacccttcgtggtgaccacagatccccagcctctgcccagaagttttctagcaggtcaacagtcccaacacccgccaagagaaggagcagtgcactgtggtcagagatgctggacatcaccatgaaggagtctctcaccaccagggagatcagacggcaggaggcaatatatgaaatgtcccgaggtgaacaggatttaattgaggatctcaaacttgcaagaaaggcctaccatgaccccatgttaaagttgtccatcatgtcagaagaggaactcacacatatatttggtgatctggactcttacatacctctgcatgaagatttgttgacaagaataggagaagcaaccaagcctgatggaacagtggagcagattggtcacattctcgtgagctggttaccgcgcttgaatgcctacagaggttactgtagtaaccagctggcagccaaagctcttcttgatcaaaagaaacaggatccaagagtccaagacttcctccagcgatgtctcgagtctcccttcagtcgaaaactagatctttggagtttcctagatatccctcgaagtcgcctagtcaaataccctttactgttaaaagaaattcttaaacacactccaaaagagcaccctgatgttcagcttctggaggatgctatattgataatacagggagtcctctctgatatcaacttgaagaaaggtgaatccgagtgccagtattacatcgacaagctggagtacctggatgaaaagcagagggaccccagaatcgaagcgagcaaagtgctgctgtgccatggggagctgcggagcaagagtggacataaactttacattttcctgtttcaagacatcttggttctgactcggcccgtcacacggaacgaacggcactcttaccaggtttaccggcagccaatcccagtccaagagctagtcctagaagacctgcaggatggagatgtgagaatgggaggctcctttcgaggagctttcagtaactcagagaaagctaaaaatatctttagaattcgcttccatgacccctctccagcccagtctcacactctgcaagccaatgacgtgttccacaagcagcagtggttcaactgtattcgagcggccattgcccccttccagtcggcaggcagtccacctgagctgcagggcctgccggagctgcacgaagagtgtgaggggaaccacccctctgcgaggaaactcacagcccagaggagggcatccacagtttccagtgttactcaggtagaagttgatgaaaacgcttacagatgtggctctggcatgcagatggcagaggacagcaagagcttaaagacacaccagacacagcccggcatccgaagagcgagggacaaagccctttctggtggcaaacggaaagagactttggtgtagagaaggctctgtgtgttaactgatgggagagactgtttgtttataaatgtgtacagttttgttttctcgtaaggggagcatcatagggttactttataccagttgtaacattttcattgtttttggttgttcttttttctttttttaatggcagctaaagatatacagattactgttaaattgcagtcctttttttttttaaagatattttcttgaattatttagaacatggtaagcctggtattttttaatcaaacaaaatatttatgaaatgggttttctcttaattctggattcatcatggctttctaataccaattgtaatatttacaatattcaccaaaacttagaattttgcaaatgctggaattctgccagtgtttctttgctaagccttgcatgcaaaatttgaaattttaacattggcacccaaaacctacatggaatgtatgtctggagtatttcaaactttacattgaaacataatttccttggaaaacaaaccataagcctgaggaggtttttatcaactggaatgctttatattagtttgtttttcactgtacattcctcattttacattcatttaacctgccgattatttaatttttttattgtaaagtagtttttagcatttgcttttatttttttactttgatgccttttcaaattggcatgtctttaaagtatttttcttcctgattaaaaatgtgtgtgtatgtgtgtgtgtgtgtgtatatatatatatttttttaaatcacattaattttaccaagtgaaaccaagccatactgtttttgagccaattaagaaaattgccatttttaaagtgtagcatttcagggtaaagacccatgaaatggcttgatgtattctagactactgaaagaaaaccacttcaaagattttgttgaaagttttagtgttgtctgaaatgcaagagggaaggtgattggtagtgagttaaaagaaaaagagaggaaaagagagtagttttgtcttcaagtaaaatgtctggttgtgccagacatttcacaagtgtgaaaggagataggagaagctcaacttgagggcgtgtagtaagttgtagaaggctcgaggggacgtggacttatttgccttggtttgcaatacctgcaaataatgagtttgaaaagaaacaatgaaatgtgttaaaaatttgaccatattagataaattttggtggatttagtcataagatggaaaaagactggtgaatcttttattacaaaatgtttctgttaaaatgggatcatcatctttgaaaggggggaggaggagtaaaagcccgattataatggtgatcaattcaagtcagtgttgactattctgtgaaatatatttggccagtggaaatgataatcagaaaagactgtaaatagatccatccaaatgatttctctgtacaaatgaatgatactattaaaaaaaaaaaaaaaa

SEQ ID NO: 157 - DNA, 1019 bp, Homo sapiens
gaggcgacgccgcggtccgcgctgatctccaggcgctcagtccgcgccgcaggtggtgcttgtctgcagagtcatgacctctttccgcttggccctcatccagcttcagatttcttccatcaaatcagataacgtcactcgcgcttgtagcttcatccgggaggcagcaacgcaaggagccaaaatagtttctttgccggaatgctttaattctccatatggagcgaaatattttcctgaatatgcagagaaaattcctggtgaatccacacagaagctttctgaagtagcaaaggaatgcagcatatatctcattggaggctctatccctgaagaggatgctgggaaattatataacacctgtgctgtgtttgggcctgatggaactttactagcaaagtatagaaagatccatctgtttgacattgatgttcctggaaaaattacatttcaagaatctaaaacattgagtccgggtgatagtttctccacatttgatactccttactgcagagtgggtctgggcatctgctacgacatgcggtttgcagagcttgcacaaatctacgcacagagaggctgccagctgttggtatatccaggagcttttaatctgaccactggaccagcccattgggagttacttcagcgaagccgggctgttgataatcaggtgtatgtggccacagcctctcctgcccgggatgacaaagcctcctatgttgcctggggacacagcaccgtggtgaacccttggggggaggttctagccaaagctggcacagaagaagcaatcgtgtattcagacatagacctgaagaagctggctgaaatacgccagcaaatccccgtttttagacagaagcgatcagacctctatgctgtggagatgaaaaagccctaaagtttatgtttctaatgtgtcacagaataggacgatatgattctacaacataatcaactccctattaaattctttaatgaaaaaaaaaaaaaaaaaaaaaaaaaaaaaaaaaaaa

SEQ ID NO: 158 - DNA, 2164 bp, Homo sapiens
gaattcggctttaggaggtccccgggttgccggcggcgacagcgggggaagcatgactgctgtgggccgaaggtgccccgcgctggggtcccgaggggctgctggagagccagaggctggcagcgactatgtgaagttctccaaggagaagtacatcctggactcatcgccagagaaactccacaaggaattggaggaggagctcaaactcagcagcacggatctccgcagccatgcctggtaccatggccgcatcccccgagaggtctcggagaccttggtacaacgcaacggcgacttcctcatccgggactcgctcaccagcctgggcgactatgtgctcacgtgccgctggcgcaaccaggccttgcacttcaagatcaacaaggtggtggtgaaggcaggcgagagctacacacacatccagtacctgtttgagcaggagagctttgaccacgtgcccgccctcgtgcgctatcatgtgggcagccgcaaggctgtgtcagagcagagtggtgccatcatctactgcccggtgaaccgcaccttcccactgcgctacctcgaggccagctatggcctgggacaggggagtagcaagcctgctagccccgtcagcccctcaggccccaagggcagccacatgaagcggcgcagcgtcaccatgaccgatgggctcactgctgacaaggtcacccgcagcgatggctgccccaccagtacgtcgctgccccgccctcgggactccatccgcagctgtgccctcagcatggaccagatcccagacctgcactcacccatgtcgcccatctccgagagccctagctcccctgcctacagcactgtaacccgtgtccatgccgcccctgcagccccttctgccacagcattgcctgcctcccctgtcgcccgctgttccagtgagccccagctgtgtcccggaagtgccccaaagacccatggggagtcagacaagggcccccacaccagcccctcccacacccttggcaaggcctccccgtcaccatcactcagcagctacagtgacccggactctggccactactgccagctccagcctcccgtgcgtggcagccgagagtgggcagcgactgagacctccagccagcaggccaggagctatggggagaggctaaaggaactgtcagaaaatggggcccctgaaggggactggggcaagaccttcacagtccccatcgtggaagtcacttcttccttcaacccggccaccttccagtcactactgatccccagggataaccggccactggaggtgggccttctgcgcaaggtcaaggagctgctggcagaagtggatgcccggacgctggcccggcatgtcaccaaggtggactgcctggttgctaggatactgggcgttaccaaggagatgcagaccctaatgggagtccgctggggcatggaactgctcaccctcccccatggccggcagctacgcctagacctgctggaaaggttccacaccatgtccatcatgctggccgtggacatcctgggctgcaccggctctgcggaggagcgggcagcgctgctgcacaagaccattcagctggcggccgagctacgggggactatgggcaacatgttcagcttcgcggcggtcatgggtgccctggacatggctcagatttctcggctggagcagacatgggtgaccctgcggcagcgacacacagagggtgccatcctgtacgagaagaagctcaagccttttctcaagagcctcaacgagggcaaagaaggcccgccgctgagcaacaccacgtttcctcatgtgctgcccctcatcaccctgctggagtgtgactcggccccaccagagggccctgagccctggggcagcacggagcacggcgtggaggtggtgctggctcacctggaggccgcccgcacagtggcacaccacggaggcctgtaccacaccaatgctgaagtcaagctgcaggggttccaggcccggccggagctcctggaggtgttcagcacggagttccagatgcgccttctctggggcagtcagggtgccagcagcagccaggcccggcgctatgagaagttcgacaaggtcctcactgccctgtcccacaagctggaacctgctgtccgctccagcgagctgtga

SEQ ID NO: 159 - DNA, 2818 bp, Homo sapiens
ggggcatgccgggagtggttgtgtacggtccgcagcggcaggtgaagtctagcagaggacgcggccaggcgattcggtgaagcgattcctgcaggcgttggttcccctctttgacctggtaaatgcaggcttttatgcgagaggatttgaatttgttgaaatgagcagtcgtaaatcaaagagtaacagcttaattcacacagagtgcctttcacaggtacaaagaattttacgtgaaagattttgtcgtcagagtccacatagtaacctatttggagtgcaagtacaatacaaacacttaagtgagctgctgaaaagaactgctctccatggagagagtaactctgtccttattatcggaccccgaggatcaggaaaaactatgttaataaatcatgctttgaaagaactcatggaaatagaagaagtgagtgaaaatgtattacaagttcacttaaatggactgctgcagatcaatgacaaaatcgccctaaaggaaatcacaaggcagttaaatctggaaaatgtagttggagataaagtttttggaagctttgctgaaaacctttcatttcttctggaagctttaaaaaaaggtgaccgaactagcagttgcccagtgatcttcatattagatgaatttgatctttttgctcatcataaaaaccaaacacttctctataatctttttgacatttctcagtctgcacagaccccaatagcagttattggtcttacatgtagattggatattttggaactcttagaaaaaagagtgaagtcaagattttctcaccggcagatacacttaatgaattcatttggttttccacagtatgttaaaatatttaaagaacagttatctctacctgcagagtttccagacaaggtttttgctgagaagtggaatgaaaatgttcagtatctctcagaagatagaagtgtgcaagaagtactacagaagcatttcaatatcagcaaaaacctgcggtcattacacatgctattgatgcttgctttaaatcgagtaacagcatcgcacccatttatgactgccgtagatctaatggaagcaagccaactgtgtagcatggactcgaaagcaaatattgtacatggtctatcagtcttggaaatctgtcttataatagcaatgaaacatttaaatgacatctatgaggaagagccatttaattttcaaatggtctataatgagtttcagaagtttgttcaaaggaaagcacattccgtttataattttgaaaaacctgttgtcatgaaggcttttgaacacttgcagcaattagaattaataaagcccatggaaagaacttcaggaaattcacagagagagtaccagctgatgaaactgcttttggataatactcaaattatgaatgctctgcagaaatatcccaactgtcctacagatgtgaggcagtgggcaacatcctcactaagctggttatgaatataaccagtgacttcaactttggcatttcattcatacttctgtagagaacggaaaactattgtccattaacatgatatgctaaacattctataaacattcttgtatttatgtgagacttgcccatctactgtcttggctgtgtcttgccttttaatcatgaacagttacatgatttataatttcactgattgagattactttgtaagtagctgttcagaagaataaaatatgactgttttagggactagaccatgtgcttttttaacacttatatatataatggtctatttgaagagctcacttcaacctaacagctagatgtctttacaaaccttaaaccaaaggagtaaaaaaaacaatggtaagcactgaagtataataagtaacctttggtacagcaggtttgctgcagtgtttttttctgtccacatgcaaattttggattctatcccagacccaggttttctagttcagaagactaaccagcttagtcagaagatggttccatggaagaaaaaggccaaggagtttgaagatttttcttctagacatctcaaaatgtggtactcataccatccacatcagaatcccttgtaggattttctaaaattacagattgttgagcctaccataggtcaaaaggactggaattttccttcttaacaagtatagtcatggcaccacgtaacattttggtcaatgacattgtataaagggtggtctcataagattataccatatttttactgtaccttttctatgtctaaatatacaaatgttttaccattgtgttacagttgcctacagtatgattacagtaacattctgtacagtgctatagctgaagagtaataggctaggctatctgtatagcctaagtgtgtaacaggctatatacatatcatcagggtctgtgtaagtatactctgtgatgttcatacagtgatgaaatcacccaaagacacatttctcagaacgtagccccatcatgaagtgacgtgactaccagagatttctggaaaagcactcccaaaagtaatgagatgtgtatggcaatgttaactgaacctgtttgtattaaaaagtaaatccctatgaggaatgtggaaatgtccgtcaaagcattgtcttttaagtaagttccaagatccatgaattaacagaggcatatatttaaaatgaaatttaatgagcacttagtgacttcatttgttcaagaatatttgatttcctattgtgtgcatgggaggtttacaaaagacagactgtccctatgcttgtgcagcttacaatctatttaactattagaggccctgtgagatgtaggcagttatttacagatga

SEQ ID NO: 160 - DNA, 1930 bp, Homo sapiens
gcgggtccggtttccggcgggagcgtgggccgccagactcgggagaggctccgtcttgtgcaagggtcctgtgggctggctgcactggcctctgcggtggtgcctgccagaatgccccacttggaaaacgtggtgctttgtcgcgagtctcaagtgtccatcttgcagtccttgtttggagagagacatcatttcagctttccatccatttttatttatggacatactgctagtggaaagacctatgtaacacaaacgttgttgaaaactttagagctcccacatgtgtttgtgaattgtgttgaatgctttacattgaggctgcttttggaacaaattttaaacaaattgaatcatcttagttcttcagaggatggatgttctactgaaataacctgtgaaacatttaatgactttgttcgcttgtttaaacaagtaaccacagctgaaaatcttaaagatcagactgtatatattgttctagataaagcagagtatctaagagatatggaagcaaatcttttgcctggatttcttagattacaagaattggctgacagaaatgtgactgttctctttctcagtgaaattgtttgggaaaagtttcgtccaaatactggatgctttgagccgtttgtcttatatttccctgattacagcataggcaaccttcaaaagatcctgtcccatgatcatcctccagagtattcagctgatttctatgctgcctacattaacattcttcttggagttttctacactgtttgtcgagatttgaaagagctcagacatctggcagtacttaattttcctaaatattgtgaacccgtggttaaaggagaagcaagtgaacgtgatactcgcaaactgtggagaaatattgaacctcatttgaagaaagctatgcagactgtttatctcagggaaatatcaagttcccagtgggaaaagctacagaaagatgacacagatccggggcaactgaaaggcctctcagcgcatactcatgtggaacttccatattactctaagttcattctaattgctgcataccttgcttcatacaatccagcaagaactgacaagaggttttttcttaagcatcatggaaaaatcaagaaaaccaactttctaaaaaaacacgaaaagacaagcaatcatctccttgggccaaaaccatttccactagacagattattagcaatattatatagtatcgtggacagcagagttgctccaacagcaaatattttttcccagattacctctctagtgacccttcagctgttaaccctggttggccatgacgatcagcttgatggaccaaaatacaaatgcacagtgtctctagacttcatcagagctattgcaaggacggtgaactttgacataataaaatacttgtatgatttcttgtgaaaacaagcttcaaagccatatggacactgtgacaatgactaagccaagctgtgttcatccagctacttagctggccaaggagaggagttctttggctctattggatttgtccaaacaggtgctggcccagcatggaatctgatgaaaatattctgattggtctgggtggatgtgagcagaagactatttaccagggaccctggagtatttggaagcaacgtgttaattataaacagcagggtttgagcacaatctgttctactcttaatgatgttatcttaacactgaaattgcctgaaacccatttacttaggactacattttgctctgtgaactatcccctgcgctttgaacgtgccagcagcccttgtttatatgcccattcttttcacttcctctccacaggagcctctgcagtcgcttgccaaagcagattttcctaaggccactgttttaaaagatcatagttgcaaaatataataaatacaagttctttttaaaatccaaaaaa

SEQ ID NO: 161 - DNA, 1630 bp, Homo sapiens
cccaggtggggagctagcctgaaagagacagcggaaggagtttcctggactgcgctgtcgctcaccgacccgcaccaatcaccatgcagcttgccctcggacccgccccttttagggcgtgtccccagtgagtgatagacggagccgccctgccctgctcagcccagcccacgttgctgcttagattgaaatgcagaactcaagcctctttcatcggggcacagacttccttttacttcttccttttgccctctcgcctcctcctcctgggaagaagcggaggcgccggccggtcggccgggatagcaacaggccgggccactgaggcggtgcggaaagtttctgtctgggagtgcggaactggggccgggttggtgtactgctcggagcaatggagccagccttcggggaggtgaaccagctgggaggagtgttcgtgaacgggaggccgctgcccaacgccatccggcttcgcatcgtggaactggcccaactgggcatccgaccgtgtgacatcagccgccagctacgggtctcgcacggctgcgtcagcaagatcctggcgcgatacaacgagacgggctcgatcttgccaggagccatcgggggcagcaagccccgggtcactacccccaccgtggtgaaacacatccggacctacaagcagagagaccccggcatcttcgcctgggagatccgggaccgcctgctggcggacggcgtgtgcgacaagtacaatgtgccctccgtgagctccatcagccgcattctgcgcaacaagatcggcaacttggcccagcagggtcattacgactcatacaagcagcaccagccgacgccgcagccagcgctgccctacaaccacatctactcgtaccccagccctatcacggcggcggccgccaaggtgcccacgccacccggggtgcctgccatccccggttcggtggccatgccgcgcacctggccctcctcgcactccgtcaccgacatcctgggcatccgctccatcaccgaccaagtgagcgacagctccccctaccacagccccaaggtggaggagtggagcagcctgggccgcaacaacttccccgccgccgccccgcacgcggtgaacgggttggagaagggagccctggagcaggaagccaagtacggtcaggcaccaaatggtctcccagctgtgggcagttttgtgtcagcatccagcatggctccttaccctaccccagcccaagtgtcgccttacatgacctacagtgctgctccttctggttatgttgctggacatgggtggcaacatgctgggggcacctcattgtctccccacaactgtgacattccggcatcgctggcgttcaagggaatgcaggcagccagagaaggtagtcattctgtcacggcttccgcgctctgatgggaaattccgtctccagcagcttcacccgggtctccctgtctcagcacctcctcccccaattcccaggtctcacatcccacccctcctgccctccaacccttctgccttgaaagctggctgtacggactcacatcctttgtgctaatgacacttacatatttcttgccataacttttctcttgcagaaaaactgacatgactttaggattt

SEQ ID NO: 162 - DNA, 2941 bp, Homo sapiens
gatttggcccggagaacgagatcaccctctcaatgaaaggcagatgtccctttaaggtttgcttctacagcccgtggactttagcctaaacacggacccgcgaagctggctttatttgtccatgtctcggacagagcctgggaagctgccagtgagatttcagagaccaagagcgcgaaggggcgggcgatgtggcaatccgtctgggatgtgaaaagcgtggagcgcatttagaggaattcgacgaaaacacaggaaatcactcctctcccgctcctgggcgccgctgccactggggcagaggactgggaaccgcggcagcgggataagtggcccagccagagagcgcagctcccgcgcccggtcctgccctgcgaaccagcgcggccccctggcgctgaggctgctccggccatggcccctcggccccgcgcccgcccaggggtcgctgtcgcctgctgctggctcctcactgacagggatggaagagaaaacttaggaagttgaagtttggcattaaaataaaggactcgccaccactctgtgcaccttcttgagggagttcattcgtccggagcgcctcacagcttagtgcgcctgcgcacgcgcgaactgcggccccgcctctcctttggggacgggagacgtgcgtcgggtcgcgggacgggggctgcgcatgcgccttcatttcgtcagcccgctgttgcgtgctgccagcgggaactgtgtaggggtagattttcgctgcagtgttccccgagcctgttagacgcagcgcgccgggagactgagagaggaaaggatagaggaagtgctgccctaggctgcatgagtcgaagcaagcgtgtttccttcccgccaggcaagtgcccttagaaaccgggccccgcccccttcctggcctgcattcccatcccctctcccggggcggaggtgaggacctccttggttcctttggttctgtcagtgagccccttccttggccatgaagctcgtgaggaagaacatcgagaaggacaatgcgggccaggtgaccctggtccccgaggagcctgaggacatgtggcacacttacaacctcgtgcaggtgggcgacagcctgcgcgcctccaccatccgcaaggtacagacagagtcctccacgggcagcgtgggcagcaaccgggtccgcactaccctcactctctgcgtggaggccatcgacttcgactctcaagcctgccagctgcgggttaaggggaccaacatccaagagaatgagtatgtcaagatgggggcttaccacaccatcgagctggagcccaaccgccagttcaccctggccaagaagcagtgggatagtgtggtactggagcgcatcgagcaggcctgtgacccagcctggagcgctgatgtggcggctgtggtcatgcaggaaggcctcgcccatatctgcttagtcactcccagcatgaccctcactcgggccaaggtggaggtgaacatccctaggaaaaggaaaggcaattgctctcagcatgaccgggccttggagcggttctatgaacaggtggtccaggctatccagcgccacatacactttgatgttgtaaagtgcatcctggtggccagcccaggatttgtgagggagcagttctgcgactacctgtttcaacaagcagtgaagaccgacaacaaactgctcctggaaaaccggtccaaatttcttcaggtacatgcctcctccggacacaagtactccctgaaagaggccctttgtgaccctactgtggctagccgcctttcagacactaaagctgctggggaagtcaaagccttggatgacttctataaaatgttacagcatgaaccggatcgagctttctatggactcaagcaggtggagaaggccaatgaagccatggcaattgacacattgctcatcagcgatgagctcttcaggcatcaggatgtagccacacggagccggtatgtgaggctggtggacagtgtgaaagagaatgcaggcaccgttaggatattctctagtcttcacgtttctggggaacagctcagccagttgactggggtagctgccattctccgcttccctgttcccgaactttctgaccaagagggtgattccagttctgaagaggattaatgattgaaacttaaaattgagacaatcttgtgtttcctaaactgttacagtacatttctcagcatccttgtgacagaaagctgcaagaatggcactttttgattcatacagggatttcttatgtctttggctacactagatattttgtgattggcaagacatgtatttaaacaataaactaaaaggaaataatctccacgtactaccatcttgattaaattgtgtaattttttataggaattatgagttatctgtagtacttggaaacagaaaatgtgtgtatttaaagacgatgcctatgcagtatattgtttgggatagattgcaaaatttcacactgcatgctttgaaacagttttccttagaaaaagcttttgctatcttatcctgtttacattatttctttattttaattctgcttggtgttcttgcattgcatttaatgatcccttttctccccacctccacacactacattttttttagatttaaatagttttactattttaaatgattgccgtacaattagtagacttgaagacaagttttaaatatttttcttcaaaggcttgttaaaccaatcatgttaaaaggaaattcttggttttggtttgttgttgttagcattagtcatatttgatttagagggtaacttaaatcagttatttttagctttttagaactttgatctgctagggattgtcaaaataatctccttgaggcatctttatttttaaaatgagattaaagtatgtgatttgcttgttatgtggctaaaaaaaaaaaaaaaaaaaaaaa

SEQ ID NO: 163 - DNA, 1888 bp, Homo sapiens
ccggtgccgggcgaacatggcggcggccaccggaccctcgttttggctggggaatgaaaccctgaaggtgccgctggcgctctttgccttgaaccggcagcgcctgtgtgagcggctgcggaagaaccctgctgtgcaggccggctccatcgtggtcctgcagggcggggaggagactcagcgctactgcaccgacaccggggtcctcttcctccaggagtccttctttcactgggcgttcggtgtcactgagccaggctgctatggtgtcatcgatgttgacactgggaagtcgaccctgtttgtgcccaggcttcctgccagccatgccacctggatgggaaagatccattccaaggagcacttcaaggagaagtatgccgtggacgacgtccagtacgtagatgagattgccagcgtcctgacgtcacagaagccctctgtcctcctcactttgcgtggcgtcaacacggacagcggcagtgtctgcagggaggcctcctttgacggcatcagcaagttcgaagtcaacaataccattcttcacccagagatcgttgagagccgagtgtttaagacggatatggagctggaggttctgcgctataccaataaaatctccagcgaggcccaccgtgaggtaatgaaggctgtaaaagtgggaatgaaagaatatgggttggaaagcctcttcgagcactactgctactcccggggcggcatgcgccacagctcctacacctgcatctgcggcagtggtgagaactcagccgtgctacactacggacacgccggagctcccaacgaccgaacgatccagaatggggatatgtgcctgttcgacatgggcggtgagtattactctgtcgcttccgacatcacctgctcctttccccgcaacggcaagttcactgcagaccagaaggccgtctatgaggcagtgctgctgagctcccgtgccgtcatgggtgccatgaagccaggtgactggtggcctgacatcgaccgcctggctgaccgcatccacctggaggagctggcccacatgggcatcctgagcggcagcgtggacgccatggtccaggctcacctgggggccgtgtttatgcctcacgggcttggccacttcctgggcattgacgtgcacgacgtgggaggctacccagagggcgtggagcgcatcgacgagcccggcctgcggagcctgcgcactgcacggcacctgcagccaggcatggtgctcaccgtggagccgggcatctacttcatcgaccacctcctggatgaggccctggcggacccggcccgcgcctccttccttaaccgcgaggtcctgcagcgctttcgcggttttggcggggtccgcatcgaggaggacgtcgtggtgatcgacagcggcatagagctgctgacctgcgtgccccgcactgtggaagagattgaagcatgcatggcaggctgtgacaaggcctttacccccttctctggccccaagtagagccagccagaaatcccagcgcacctgggggcctggccttgcaacctcttttcgtgatgggcagcctgctggtcagcactccagtagcgagagacggcacccagaatcagatcccagcttcggcatttgatcagaccaaacagtgctgtttcccggggaggaaacacttttttaattacccttttgcaggcaccacctttaatctgttttataccttgcttattaaatgagcgacttaaaatgattgaaaataatgctgtcctttagtagcaagtaaaatgtgtcttgctgtcatttatattccttttcccaggaaagaagcatttctgatactttctgtcaaaaatcaatatgcagaatggcatttgcaataaaaggtttcctaaaatg

SEQ ID NO: 164 - DNA, 1807 bp, Homo sapiens
ctggaaggagtcatggcggatggtcaggtggcggaactgctgctccggcggctggaggcgtctgatggcggcctggacagcgccgagttggcggctgagctgggcatggagcaccaggcggtggtgggcgccgtgaagagccttcaggcgctgggcgaggtcatcgaggctgaacttcggtccaccaagcactgggagcttactgcggagggcgaggagattgcccgggagggcagccatgaggcccgtgtgtttcgaagcattcccccagagggcctggcccagagcgagcttatgcgactgcccagtggcaaagtgggcttcagcaaggccatgtccaacaagtggattcgggtggacaagagtgcggctgacgggccccgggtgttccgagtggtggacagcatggaggatgaggtgcagcggcggctccagctggtccgggggggacaggctgagaagctgggggagaaggagaggagcgagctgaggaagaggaagctgttggctgaagtgactctgaagacctactgggtgagcaaaggcagtgcctttagtaccagcatctccaagcaagagacagagctgagcccagagatgatctccagtggctcttggcgggaccggcccttcaagccctacaacttcttggcccacggtgtcctccccgacagcggccaccttcacccgctgctcaaggtccgctcccagttccgacagatcttcctggagatggggttcaccgagatgccgactgataacttcattgagagctccttctggaactttgacgccctcttccagccccagcagcacccagcccgtgaccagcacgacaccttcttccttcgagatccagcggaggccctgcagctcccaatggactatgtccagcgggtcaagcggacccactctcagggcggctacggctcacaggggtacaagtataactggaagctggacgaggcccggaaaaacctactgcgaacccacaccacatcagccagcgcccgtgcgctctaccgccttgcccagaagaagcccttcactccggtcaagtacttctccatcgaccgcgtattccggaatgagaccctggacgccacgcacctggctgagttccaccagatcgagggcgtggtggcggatcatggtctcaccttgggccacctcatgggcgttctgcgggagttcttcaccaagctgggtatcacgcaactccgcttcaagccagcctacaacccatacacagagcccagcatggaggtgttcagctaccaccaaggcctgaagaagtgggtggaggtcggaaactcgggggtcttccgtccagagatgctgctgcccatggggcttcccgagaacgtgtcggtcattgcctggggcctctccctggagcgcccaacgatgatcaaatatggcatcaacaatatccgggagctggtgggccacaaggtgaacctgcagatggtgtatgacagtcccctgtgccgcctggatgccgagccgaggccccctcccacacaggaggctgcgtgacatgggccactctaggacaggtcatcctccccgagtccctgctgctgcgctcctttgcatccctggccagtgaccttgtatttatgaggctctgtgaggccagcccccaccttcctctttcccacctgtcccaggaccagaatcccagggacagaggactgggtagcaggttccttctgttgtcctgtgtggtgtgtctactgtgagggtgggccctgaggagacctgtgggccacctattgtctaataaagtgggcagttgccccca

SEQ ID NO: 165 - DNA, 3231 bp, Homo sapiens
ctccagggacaggcagccaccatgagcctcagtgaggagcaggcccggagctttctggaccagaaccccgattttgcccgccagtactttgggaagaaactgagccctgagaatgttggccgcggctgcgaggacgggtgcccgccggactgcgacagcctccgggacctctgccaggtggaggagagcacggcgctgctggagctggtgcaggatatgcaggagagcatcaacatggagcgcgtggtcttcaaggtcctgcggcgcctctgcaccctcctgcaggccgaccgctgcagcctcttcatgtaccgccagcgcaacggcgtggccgagctggccaccaggcttttcagcgtgcagccggacagcgtcctggaggactgcctggtgccccccgactccgagatcgtcttcccactggacatcggggtcgtgggccacgtggctcagaccaaaaagatggtgaacgtcgaggacgtggccgagtgccctcacttcagctcatttgctgacgagctcactgactacaagacaaagaatatgctggccacacccatcatgaatggcaaagacgtcgtggcggtgatcatggcagtgaacaagctcaacggcccattcttcaccagcgaagacgaagatgtgttcttgaagtacctgaattttgccacgttgtacctgaagatctatcacctgagctacctccacaactgcgagacgcgccgcggccaggtgctgctgtggtcggccaacaaggtgtttgaggagctgacggacatcgagaggcagttccacaaggccttctacacggtgcgggcctacctcaactgcgagcggtactccgtgggcctcctggacatgaccaaggagaaggaattttttgacgtgtggtctgtgctgatgggagagtcccagccgtactcgggcccacgcacgcctgatggccgggaaattgtcttctacaaagtgatcgactacatcctccacggcaaggaggagatcaaggtcattcccacaccctcagccgatcactgggccctggccagcggccttccaagctacgtggcagaaagcggctttatttgtaacatcatgaatgcttccgctgacgaaatgttcaaatttcaggaaggggccctggacgactccgggtggctcatcaagaatgtgctgtccatgcccatcgtcaacaagaaggaggagattgtgggagtcgccacattttacaacaggaaagacgggaagccctttgacgaacaggacgaggttctcatggagtccctgacacagttcctgggctggtcagtgatgaacaccgacacctacgacaagatgaacaagctggagaaccgcaaggacatcgcacaggacatggtcctttaccacgtgaagtgcgacagggacgagatccagctcatcctgccaaccagagcgcgcctggggaaggagcctgctgactgcgatgaggacgagctgggcgaaatcctgaaggaggagctgccagggcccaccacatttgacatctacgaattccacttctctgacctggagtgcaccgaactggacctggtcaaatgtggcatccagatgtactacgagctgggcgtggtccgaaagttccagatcccccaggaggtcctggtgcggttcctgttctccatcagcaaagggtaccggagaatcacctaccacaactggcgccacggcttcaacgtggcccagacgatgttcacgctgctcatgaccggcaaactgaagagctactacacggacctggaggccttcgccatggtgacagccggcctgtgccatgacatcgaccaccgcggcaccaacaacctgtaccagatgaagtcccagaaccccttggctaagctccacggctcctcgattttggagcggcaccacctggagtttgggaagttcctgctctcggaggagaccctgaacatctaccagaacctgaaccggcggcagcacgagcacgtgatccacctgatggacatcgccatcatcgccacggacctggccctgtacttcaagaagagagcgatgtttcagaagatcgtggatgagtccaagaactaccaggacaagaagagctgggtggagtacctgtccctggagacgacccggaaggagatcgtcatggccatgatgatgacagcctgcgacctgtctgccatcaccaagccctgggaagtccagagcaaggtcgcacttctcgtggctgctgagttctgggagcaaggtgacttggaaaggacagtcttggatcagcagcccattcctatgatggaccggaacaaggcggccgagctccccaagctgcaagtgggcttcatcgacttcgtgtgcacattcgtgtacaaggagttctctcgtttccacgaagagatcctgcccatgttcgaccgactgcagaacaataggaaagagtggaaggcgctggctgatgagtatgaggccaaagtgaaggctctggaggagaaggaggaggaggagagggtggcagccaagaaagtaggcacagaaatttgcaatggcggcccagcacccaagtcttcaacctgctgtatcctgtgagcactggtcccgtggggaccctatggctccctcaatcttcacccactaggatttgggttctgcctgtggctatttgctacaagaggttaggaagcccaagaaaatgactgaagatcattctggatattttaattttttttttttttttttttttgagatggagtcttgctctgtcacccaggctggagtgccgtggcacgatctcagctcactgcaacctccacctcccaggttcaagcgattctcgtgcctcagcctcctgagtagctgggactacaggcgcccaccaccacacatgctaatttttgtattttcagtacagatggggtttcaccatattgggcaggctggtctcgaactcctgacctcaggtgatcaccgcctcagcttcctgaagtgctgggattacaggcatgagccaccacgcccagcctgtttttataaactgaagccaactgtgaataaactgtagcctacattactcatccatttttggatagttaccactgggagacctttgaaaagggtccatgaactctgaaatcactgagaacatttgcagccacacatgtacatatgtgtacacaggtagacagatggacacaggccgtttctcatccagtttaggaaaacacacatgctcag

SEQ ID NO: 166 - DNA, 1937 bp, Homo sapiens
ggccgcagtttctggagggagccgctgcgggtctttccctcactcgtcctccgcgcgtcgccgctcttcggttctgctctgtccgccgccatggcccaagctgacatcgcgctgatcggattggccgtcatgggccagaacttaattctgaacatgaatgaccacggctttgtggtctgtgcttttaataggactgtctccaaagttgatgatttcttggccaatgaggcaaagggaaccaaagtggtgggtgcccagtccctgaaagagatggtctccaagctgaagaagccccggcggatcatcctcctggtgaaggctgggcaagctgtggatgatttcatcgagaaattggtaccattgttggatactggtgacatcatcattgacggaggaaattctgaatatagggacaccacaagacggtgccgagacctcaaggccaagggaattttatttgtggggagcggagtcagtggtggagaggaaggggcccggtatggcccatcgctcatgccaggagggaacaaagaagcgtggccccacatcaagaccatcttccaaggcattgctgcaaaagtgggaactggagaaccctgctgtgactgggtgggagatgagggagcaggccacttcgtgaagatggtgcacaacgggatagagtatggggacatgcagctgatctgtgaggcataccacctgatgaaagacgtgctgggcatggcgcaggacgagatggcccaggcctttgaggattggaataagacagagctagactcattcctgattgaaatcacagccaatattctcaagttccaagacaccgatggcaaacacctgctgccaaagatcagggacagcgcggggcagaagggcacagggaagtggaccgccatctccgccctggaatacggcgtacccgtcaccctcattggagaagctgtctttgctcggtgcttatcatctctgaaggatgagagaattcaagctagcaaaaagctgaagggtccccagaagttccagtttgatggtgataagaaatcattcctggaggacattcggaaggcactctacgcttccaagatcatctcttacgctcaaggctttatgctgctaaggcaggcagccaccgagtttggctggactctcaattatggtggcatcgccctgatgtggagagggggctgcatcattagaagtgtattcctaggaaagataaaggatgcatttgatcgaaacccggaacttcagaacctcctactggacgacttctttaagtcagctgttgaaaactgccaggactcctggcggcgggcagtcagcactggggtccaggctggcattcccatgccctgttttaccactgccctctccttctatgacgggtacagacatgagatgcttccagccagcctcatccaggctcagcgggattacttcggggctcacacctatgaactcttggccaaaccagggcagtttatccacaccaactggacaggccatggtggcaccgtgtcatcctcgtcatacaatgcctgatcatgctgctcctgtcaccctccacgattccacagaccaggacattccatgtgcctcatggcactgccacctggccctttgccctattttctgttcagttttttaaaagtgttgtaagagactcctgaggaagacacacagtttatttgtaaagtagctctgtgagagccaccatgccctctgcccttgcctcttgggactgaccaggagctgctcatgtgcgtgagagtgggaaccatctccttgcggcagtggcttccgcgtgccccgtgtgctggtgcggttcccatcacgcagacaggaagggtgtttgcgcactctgatcaactggaacctctgtatcatgcggctgaattccctttttcctttactcaataaaagctacatcacactga

SEQ ID NO: 167 - DNA, 1762 bp, Homo sapiens
gctaatcccagtcggtgccgcatccccagcccgccgccatggccgcctacaaactggtgctgatccggcacggcgagagcgcatggaacctggagaaccgcttcagcggctggtacgacgccgacctgagcccggcgggccacgaggaggcgaagcgcggcgggcaggcgctacgagatgctggctatgagtttgacatctgcttcacctcagtgcagaagagagcgatccggaccctctggacagtgctagatgccattgatcagatgtggctgccagtggtgaggacttggcgcctcaatgagcggcactatgggggtctaaccggtctcaataaagcagaaactgctgcaaagcatggtgaggcccaggtgaagatctggaggcgctcctatgatgtcccaccacctccgatggagcccgaccatcctttctacagcaacatcagtaaggatcgcaggtatgcagacctcacagaagatcagctaccctcctgtgagagtctgaaggatactattgccagagctctgcccttctggaatgaagaaatagttccccagatcaaggaggggaaacgtgtactgattgcagcccatggcaacagcctccggggcattgtcaagcatctggagggtctctctgaagaggctatcatggagctgaacctgccgactggtattcccattgtctatgaattggacaagaacttgaagcctatcaagcccatgcagtttctgggggatgaagagacggtgcgcaaagccatggaagctgtggctgcccagggcaaggccaagaagtgaaggccggcggggaggatactgtccccaggagcaccctccctgcccgtcttgtccctctgcccctcccacctgcacatgtcacactgaccacatctgtagacatcttgagttgtagctgcagacggggaccagtggctcccattttcattttagccattttgtcgcctgcacccactcccttcatacaatctagtcagaatagcagttctagagcacaggttctcagtctaagctatggaaaagctccccttatccaacagagtttaaaagtagtgacttgggtttttgcgagtgctttgtttactaaggactttggggaggaaccatgctaagccatgaccagtgaggagaagcaacagagcctgtctgtccccatgagcggagtctgtcctctgctcttctgcagtcaggtcactgcctactgcctgggggctctagtcattccagtggaagacgaatgtaacctgcgtggtgatgtgacaactgtttcctccctgaccccagaggatctggctctaggttgggatcaatcctgaatttcgttatgtgttaatttacttttattaaaaaagtatagtatatataatacaaaacaataacccttctggggtttcttgtggcggttgaaatagtcccacatgtggtcatcagaaaataagccattcctcataccaatataggatcagctccttgacctctgaggggcaggagtgcttcctggtgtgtgtattagaatcccttcctgccttgtttcatggcagtgaaatgcctcttggtcctgtccaagtgtatctttcactgatttctgaatcatgttctagttgcttgaccctgccacatgggtccagtgttcatctgagcataactgtactaaatcctttttccatatcagtataataaaggagtgatgtgcaataaaaaaaaaaaaaaaaaaaaaaaaaaaaaaaaaaaaaaaaaaa

SEQ ID NO: 168 - DNA, 1890 bp, Homo sapiens
ctagagaggccgccaggagacccggcgctttcttccttctgcagctgaggctgcggcggggccggggctggggtcggggccaggaggaattttgttgtcagagaataaaaggaggttgtccataattgactttaagcagcaatcagtaaaacattgagctcttcagctccgcctttcttgctctgaaaattggaaaaccaagaaggttttgatgttttgtgtgacgccacctgaattagaaaccaagatgaacataaccaaaggtggtctggtgttgttttcagcaaactcgaattcatcatgtatggagctatcaaagaaaattgcagagcggctaggggtggagatgggcaaagtgcaggtttaccaggaacctaacagagaaacaagagtacaaattcaagagtctgtgaggggaaaagatgttttcatcatccaaactgtttcgaaggacgtgaacaccaccatcatggagctcctgatcatggtgtatgcatgtaagacctcttgtgccaagagcatcattggcgtgataccctactttccttacagcaagcagtgcaagatgagaaaaagaggctccattgtctctaaattgctggcttccatgatgtgcaaagctggtctaactcatcttattactatggatttacaccagaaggaaattcagggcttcttcaatattcctgttgacaatttaagagcatctcccttcttattacagtatattcaagaagagatcccagattacaggaatgcagtaatcgtggccaagtctccagcctcggcgaagagggcacagtcttttgctgagcgcctgcgcctgggaattgcagtgattcatggagaggcgcaggatgccgagtcggacttggtggatggacggcattccccacccatggtcagaagtgtggctgccatccaccccagcctggagatccccatgctgattcctaaagaaaagcccccaatcacggttgtgggtgatgttggaggaaggattgccatcatcgtggatgacatcattgatgatgttgacagctttcttgctgcagcagagaccctgaaggaaagaggtgcatataagatctttgtgatggcaactcatggcttgttgtcttctgacgccccccggcggattgaagagtctgccattgatgaggtggtggtcaccaatacaattccacatgaagtccagaagctccagtgccccaagattaaaactgtggatatcagcatgatcctttcagaggcgatccgtcggatccacaatggggagtccatgtcctaccttttcagaaacataggcttagatgactgagttttcctttaggaaaactcccgagggccaaactggaaacataagagtgactgctcggtgggatggatttcacaggaaccgtcatgcttgttcctccctctcccctgtaacctcacttcttattgattcctaagaagatagaccaactttttatgtcggtttgggtgtttgtgagtttggggagcaatttttataaaagaaaaactttattctcctcttttgaaaaggtaagacctcgttttagttgtaactgtttaaaaaataacacttggaataagatttgtaagctcacaaagccttcttccaaagttgcttgagccaagtgcttaaaaagttaataaaataaaatgatctgtatgatacctgcaattgaaaagccgaaaagattatactgtcaagtccagtaaatgacatttttagagatgcttttgtagacaagcatatggaatatgtgattgtatttattttctgcaactaaaaaaggaataaaaacttgtgtttgtgtgtttttctaaaactttgtgttttggcaatcgttttataactaaaataaaatgaaagctaaatct

SEQ ID NO: 169 - DNA, 4284 bp, Homo sapiens
ggccaaggcggcgaccggagcgcgatggcgggggcggcgggactcacggcagaagtgagctggaaggtcttggagcgaagagctcggaccaagcgctcaggctcagtttatgaacctcttaaaagcattaatcttccaagacctgataatgaaactctctgggataagttggaccattattacagaattgtcaagtcaacattgctgctgtatcaaagtccaactaccggtctctttcccactaaaacatgcggtggtgaccagaaggccaagatccaggacagcctatactgcgctgctggggcctgggctttggctcttgcatacaggcgaattgatgatgacaagggaaggacccatgagctggagcactcagctataaaatgcatgagaggaattctctactgctatatgcgtcaggccgataaggtccagcagtttaagcaggatccacgcccaacaacatgtcttcactctgttttcaatgtgcatacaggagatgagttgctttcctatgaggaatatggtcatcttcagataaatgcagtgtcactttatctcctttaccttgtggaaatgatttcctcaggactccagattatctacaacactgatgaggtctcttttattcaaaaccttgtattttgtgtggaaagagtttaccgtgtgcctgactttggtgtctgggaaagaggaagcaaatataataatggcagcacagagctacattcgagctcggttggtttagcaaaagcagctctagaagcaattaatggattcaacctttttggcaaccagggctgttcgtggtcagttatatttgtggatctcgatgctcacaatcgcaacaggcaaactttgtgctcgctgttacccagagaatcaagatcacataatacagatgctgccctgctcccctgcatcagttatcctgcatttgccctggatgatgaagttctttttagccagacacttgataaagtggttagaaaattaaaaggaaaatatggatttaaacgtttcttgagagatgggtatagaacatcattggaagatcccaacagatgctactacaagccagctgaaattaagctatttgatggcattgaatgtgaatttcccatatttttcctttatatgatgattgatggagtttttagaggcaatcctaagcaagtacaggaatatcaggatcttttgactccagtacttcatcataccacagaaggatatcctgttgtaccaaagtactattatgtgccagctgactttgtagaatatgaaaaaaataaccctggtagtcaaaaacgatttcctagcaactgtggccgtgatggaaaactgtttctttggggacaagcactttatatcatcgcaaaactcctggctgatgaacttattagtcctaaagacattgatcctgtccagcgctatgtcccactaaaggatcaacgtaacgtgagcatgaggttttccaatcagggcccactggaaaatgacttggtagttcatgtggcacttatagcagaaagccaaagacttcaagtttttctgaacacatatggtattcaaactcaaactcctcaacaagtagaacccattcagatatggcctcagcaggagcttgtgaaagcttatttgcagctgggtatcaatgaaaagttaggactctctggaaggccagacaggcccattggctgcctcgggacatcaaagatttatcgcattctaggaaagactgtggtttgttacccgattattttcgacctaagtgatttctacatgtctcaggatgttttcctgctgatagatgacataaagaatgcgctgcagttcattaaacaatattggaaaatgcatggacgtccacttttccttgttctcatccgggaagacaatataagaggtagccggttcaaccccatattagatatgctggcagcccttaaaaaaggaataattggaggagtcaaagttcatgtggatcgtctacagacactaatatctggagctgtggtagaacaacttgatttcctacgaatcagtgacacagaagagcttccagaatttaagagttttgaggaactagaacctcccaaacattcaaaagtcaaacggcaaagcagcacccctagtgctcctgaactgggacagcagccggatgtcaacattagtgaatggaaggacaaacccacccacgaaattcttcaaaaactgaatgattgcagttgtctggctagccaagccatcctgctgggtatactgctcaaaagagaaggccccaacttcatcacaaaggaaggtaccgtttctgatcacattgagagagtctatagaagagctggcagccaaaaactttggttggcggtgcgctacggggctgcatttacccagaaattttcttcctctatagccccacacattactacttttctggtacatgggaaacaggtaactctgggtgcctttgggcatgaagaagaagttatctctaatcctttgtctccaagagtgattcaaaacatcatctattataagtgtaacacccatgatgagagggaagcggtcattcagcaagaactggtcatccatattggctggatcatctccaataaccctgagttattcagtggcatgctgaaaatacgaatcgggtggatcatccatgccatggagtatgaacttcagatccgtggcggagacaagccagccttggacttgtatcagctgtcacctagtgaagttaaacagcttctgctggatattctgcagcctcaacagaatggaagatgttggctgaacaggcgtcagatcgatgggtctttgaatagaactcccaccgggttctatgaccgagtgtggcagattctggagcgcacgcccaatgggatcattgttgctgggaagcatttgcctcagcaaccaaccctgtcagatatgaccatgtatgagatgaatttctctctccttgttgaagacacgttgggaaatattgaccagccacagtacagacagatcgttgtagagttacttatggttgtatccattgtactggaaagaaaccccgagctagaatttcaagacaaagtagatctagacagactggtcaaagaagcatttaatgaatttcaaaaagatcagagtcggctaaaggaaattgaaaaacaagatgacatgacttccttttacaacactcctcccctgggaaaaagaggaacatgcagctatttgacaaaggcggtgatgaatctgctgctggaaggagaagtcaagccaaacaatgatgacccgtgtctgattagctagtggggaaggtgtaggaagctctgttgagacacatgttctgaagtgtgttgtgtttcatgttcaagcttaatcaaggcagccattaatatacgaactgagcatgctggggaggtgaatgccacatccttggcggggttatggacctcttgcatgtcatagccaatctaacggtaatggtaaatgcttttaatcaagcaggaaaaagttctcatgattatgccaactataatagtaatcctcactgagtgataaaaatagtttatgaattgaaaatttgccgctgcatgttgtatgatcaaatagttcatcaaaatgaatctttgctctttggactgaattcttaccatactgccattaaaataaatttgccaactagtaatgcatactggaaatcaaaagatactgaaagaatggtgaacttctcttagtggtattgtcatgctaaaagatgttaatatacatcataaaagcaaagtcagccagctgatattttggttctcaaaaactgcattattaataatattttagtatacagagctattctacagtttttacattgtaaacatgactgtggttttgtatttgctaaatataggggttggactaaaatataataaatctgtaccttatcaaacattttctttgagctcctgctaaaaataggacatgtctatgattgttcaaaaatatgttaaatttaggctcagcacagtagctcacacctgaaatcttagcacttcgggaggctgaggcaggtggatcacttgaggttaggagttcaagaccagcccagccaacatggtgaaaaccctgtctctactaaaaatacaaaaattagccaggcatgatggtgcatgccttttaaacccagctactgaggaggctgaggcatgagaattgcttgaaccaggagacggaggttgcagtgagctgaaatcctgccactgcacaccagcctgggtgacagagcgagactcc

SEQ ID NO: 170 - DNA, 878 bp, Homo sapiens
gcgcgggcagggccgcacgagctggctggctgcttgcacccacatccttctttctctgggacctggggtcgcggttacttgggctggccggcgaacccttgagtggcctggcggggagcgggcctcgcgcgcctggagggccctgtggaacgaagagaggcacacagcatggcagaaaaccgagagccccgcggtgctgtggaggctgaactggatccagtggaatacacccttaggaaaaggcttcccagccgcttgccccggagacccaatgacatttatgtcaacatgaagacggactttaaggcccagctggcccgctgccagaagctgctggacggaggggcccggggtcagaacgcgtgctctgagatctacattcacggcttgggcctggccatcaaccacgccatcaacatcgcgctgcagctgcaggcgggcagcttcgggtccttgcaggtggctgccaatacctccaccgtggagcttgttgatgagctggagccagagaccgacacacgggagccactgactcggatccgcaacaactcagccatccacatccgagtcttcagggtcacacccaagtaattgaaaagacactcctccacttatcccctccgtgatatggctcttcgcatgctgagtactggacctcggaccagagccatgtaagaaaaggcctgttccctggaagcccaaaggactctgcattgagggtgggggtaattgtctcttggtggcccagttagtgggccttcctgagtgtgtgtatgcggtctgtaactattgccatataaataaaaaatcctgttgcactagtgtcctgccaaaaaaaaaaaaaaaaaaaaaaaaaaaaaaaaaaaaaaaaaaaaaaa

SEQ ID NO: 171 - DNA, 2390 bp, Homo sapiens
ggatttgcggagcgccgcgccgctgccgggagccggcaggcccgagagtgaccggagtcacggcgggcgccggcggagctgcggcgtcggacccgcctcctggaggagctcagccccgaccaggcccggccccattcccgccccgcgccgcctccccgccgccgccgccgccgccgccgcgggagcgctcccctgcccaccccgcccccgcggccgagcccgggagtcgagtgggagtcggccggccggcgcgggcagcgccgggaccccgcgggggacactgcagccggagcccgggaggggccgcgccgccaccgtctgaactaggatgtcccgacatgaaggtgtcagctgtgatgcatgtttaaaaggaaattttcgaggtcgcagatataagtgtttaatttgctacgattacgatctttgtgcatcttgttatgaaagtggtgcaacaacaacaaggcatacaactgaccacccaatgcagtgcatattaacaagggtagattttgatttatactatggtggggaagctttctctgtagagcagccacagtcttttacttgtccctattgtggaaaaatgggctatacggagacatctcttcaagaacatgttacttctgaacatgcagaaacatcaacagaagtgatttgtccaatatgtgcagcgttacctggaggcgatcctaatcatgtcacggatgactttgcagctcatcttacacttgaacacagagcccctagagatttagatgaatcgagtggtgttcgacatgtacgtagaatgtttcaccctggccggggattaggaggtcctcgtgctcgtagatcaaacatgcactttactagcagttctactggtggactttcttcttctcagagttcatattctccaagcaatagggaagccatggatcctatagctgagcttttatctcagttatcaggagtgagacgttctgcaggaggacagcttaattcctctggcccttccgcttctcagttacaacaactgcagatgcagctgcagctagaacggcagcatgcccaggcagcacggcaacaactggagaccgcacgcaacgcaacccggcgtactaacacaagcagtgtcaccactacaatcacacaatccacagcaacaaccaacatagctaatacagaaagcagtcagcagactctacagaattcccagtttcttttaacaaggttgaatgatcctaaaatgtctgaaacggagcgccagtccatggaaagcgagcgtgcagaccgcagcctgtttgtccaagagctccttctgtccactttagtgcgtgaagagagctcatcctcagatgaggatgatcggggggagatggcagattttggtgctatgggctgtgtagatattatgcctttagatgttgctttagaaaacctaaatttaaaagagagtaataaaggaaatgagcctccaccacctcctctttgatgacatcccaattcgcagacaatgtcctctgtgctgtatttgccaatgaaagtggacaacaactatcttgggtttgtttggtgattgtaatttcaggtctgtcactcttgttacattgtgtacattcaaaaggaagagagaaaatatatatgataatcatttccacttaactaatttttacttctagcaggtaaatgtaggtagcagtgcaggggtgatctctgcttcctgtaccttgacatgcaaaaggctctcctaatactccacattcaaactgaagaggaaaattgaaatctctaatgaagctgctgtgtgtatttatgaatattaatgaataaaaactgcttggatggtttaccttaactactgcatgaggttttttgcagcgtgcatgagttttagtgaccttgttatttaagaagttaaatacaaggagtaaaacttaaaaaaaaaatacaaagcccaaagctttcccaaacattattcaatggttacacgacgaagtagcttttgaataatgtctgcctgaatcacctttctttgtgtgcctcctacgcacaaagccagctctgcagtggaatctggggattatagccgggtgtggcactccgccctgtgtgactgtcctgtcgccctgttagtcatcttgcctgtgtggagctcagcctgtctctttaactcatctgtagaagacacaccagtaaagctactgttggaatctgctgcaggggcctttgtgtgccctaaaaacaaatcctgttcatgtttgtttaaagtttttactttttgtggttgtttaaaattttttcaattgttaaatatgttttattcaggtgtagatgaatttcatttattgactgttcaacagagttaacctgaattatgttgtctttgtttttaaaaatctcacattctc

SEQ ID NO: 172 - DNA, 1901 bp, Homo sapiens
gggcaggaagacggcgctgcccggaggagcggggcgggcgggcgcgcgggggagcgggcggcgggcgggagccaggcccgggcgggggcgggggcggcggggccagaagaggcggcgggccgcgctccggccggtctgcggcgttggccttggctttggctttggcggcggcggtggagaagatgctgcagtccctggccggcagctcgtgcgtgcgcctggtggagcggcaccgctcggcctggtgcttcggcttcctggtgctgggctacttgctctacctggtcttcggcgcagtggtcttctcctcggtggagctgccctatgaggacctgctgcgccaggagctgcgcaagctgaagcgacgcttcttggaggagcacgagtgcctgtctgagcagcagctggagcagttcctgggccgggtgctggaggccagcaactacggcgtgtcggtgctcagcaacgcctcgggcaactggaactgggacttcacctccgcgctcttcttcgccagcaccgtgctctccaccacaggttatggccacaccgtgcccttgtcagatggaggtaaggccttctgcatcatctactccgtcattggcattcccttcaccctcctgttcctgacggctgtggtccagcgcatcaccgtgcacgtcacccgcaggccggtcctctacttccacatccgctggggcttctccaagcaggtggtggccatcgtccatgccgtgctccttgggtttgtcactgtgtcctgcttcttcttcatcccggccgctgtcttctcagtcctggaggatgactggaacttcctggaatccttttatttttgttttatttccctgagcaccattggcctgggggattatgtgcctggggaaggctacaatcaaaaattcagagagctctataagattgggatcacgtgttacctgctacttggccttattgccatgttggtagttctggaaaccttctgtgaactccatgagctgaaaaaattcagaaaaatgttctatgtgaagaaggacaaggacgaggatcaggtgcacatcatagagcatgaccaactgtccttctcctcgatcacagaccaggcagctggcatgaaagaggaccagaagcaaaatgagccttttgtggccacccagtcatctgcctgcgtggatggccctgcaaaccattgagcgtaggatttgttgcattatgctagagcaccagggtcagggtgcaaggaagaggcttaagtatgttcatttttatcagaatgcaaaagcgaaaattatgtcactttaagaaatagctactgtttgcaatgtcttattaaaaaacaacaaaaaaagacacatggaacaaagaagctgtgaccccagcaggatgtctaatatgtgaggaaatgagatgtccacctaaaattcatatgtgacaaaattatctcgaccttacataggaggagaatacttgaagcagtatgctgctgtggttagaagcagattttatacttttaactggaaactttggggtttgcatttagatcatttagctgatggctaaatagcaaaatttatatttagaagcaaaaaaaaaaagcatagagatgtgttttataaataggtttatgtgtactggtttgcatgtacccacccaaaatgattatttttggagaatctaagtcaaactcactatttataatgcataggtaaccattaactatgtacatataaagtataaatatgtttatattctgtacatatggtttaggtcaccagatcctagtgtagttctgaaactaagactatagatattttgtttcttttgatttctctttatactaaagaatccagagttgctacaataaaataaggggaataataaacttgagagtgaataaccat

SEQ ID NO: 173 - DNA, 2710 bp, Homo sapiens
gcaggcatcgtctcctccggtctcacagctaccccgggctggagcgtggggagggggtaagggagccagccaactcggggaaacttcgttgccagagatgactggggttttcgggctttcccagccttcccatgccgggccacacggcattcattaaagtggtggggcaactattggtgcgctccagccgggcaggttttgagctgcagagacccgtgcccggtagcagcgctttgccaccgagtgcacccaggacgcagtggccgccagcccgggtctcctgctgggggccggcgagtgcagggagactttgcgccacgatgttttgttttcctgccgcaggaacgctaggcagtctctttccaccagacttaacccgcctgaagcaatagccatggaagttgcggcggcacagagggagacagaaccgcttggagcggcatctttcttggatgttttttctctacacagacttctttctttccttggtggccgttcccgcagcagcaccggtgtgccagcccaagagcgccactaacgggcaacccccggctccggctccgactccaactccgcgcctgtccatttcctcccgagccacagtggtagccaggatggaaggcacctcccaagggggcttgcagaccgtcatgaagtggaagacggtggttgccatctttgtggttgtggtggtctaccttgtcactggcggtcttgtcttccgggcattggagcagccctttgagagcagccagaagaataccatcgccttggagaaggcggaattcctgcgggatcatgtctgtgtgagcccccaggagctggagacgttgatccagcatgctcttgatgctgacaatgcgggagtcagtccaataggaaactcttccaacaacagcagccactgggacctcggcagtgcctttttctttgctggaactgtcattacgaccatagggtatgggaatattgctccgagcactgaaggaggcaaaatcttttgtattttatatgccatctttggaattccactctttggtttcttattggctggaattggagaccaacttggaaccatctttgggaaaagcattgcaagagtggagaaggtctttcgaaaaaagcaagtgagtcagaccaagatccgggtcatctcaaccatcctgttcatcttggccggctgcattgtgtttgtgacgatccctgctgtcatctttaagtacatcgagggctggacggccttggagtccatttactttgtggtggtcactctgaccacggtgggctttggtgattttgtggcagggggaaacgctggcatcaattatcgggagtggtataagcccctagtgtggttttggatccttgttggccttgcctactttgcagctgtcctcagtatgatcggagattggctacgggttctgtccaaaaagacaaaagaagaggtgggtgaaatcaaggcccatgcggcagagtggaaggccaatgtcacggctgagttccgggagacacggcgaaggctcagcgtggagatccacgataagctgcagcgggcggccaccatccgcagcatggagcgccggcggctgggcctggaccagcgggcccactcactggacatgctgtcccccgagaagcgctctgtctttgctgccctggacaccggccgcttcaaggcctcatcccaggagagcatcaacaaccggcccaacaacctgcgcctgaaggggccggagcagctgaacaagcatgggcagggtgcgtccgaggacaacatcatcaacaagttcgggtccacctccagactcaccaagaggaaaaacaaggacctcaaaaagaccttgcccgaggacgttcagaaaatctacaagaccttccggaattactccctggacgaggagaagaaagaggaggagacggaaaagatgtgtaactcagacaactccagcacagccatgctgacggactgtatccagcagcacgctgagttggagaacggaatgatacccacggacaccaaagaccgggagccggagaacaactcattacttgaagacagaaactaaatgtgaaggacattggtcttggactgagcgttgtgtgtgtgtgtgtgtgtgtgtttttaatattcacactgagacatgtgccttaaacagactttttagtccaaaattacatagcattgaagaatatatttcactgtgccataaacaactgaaagcttgctctgccaaaaggaatcagagaacaagaacttcatttcagatagcaaacgcaggacacaccaagagtgtccgtgcacgtagccggttctggccgtacatgttaagggcatttcagtggcagtgctgtacccctgggcagtgctacctgggcacacacgtagacaagggcagctattccttagaccagcctcctgaaagaaacaggtgtgtctttttagtggagtcgtagtaatatgtgcacacacagaaggggacctgattgggtgggagctggttatgtgtaactagcgttggagttgacattttggcatgtgctctgagcttgaattttgataccaaccattcagtgcatcatacctagtctttctatgctccaaatgaatgtctgtggggacctgagagcacctggaatttgttggaagcagatcagagcacacgtacgaaaaggtgcaattgcttttctcatgacaaaagaaaaaaaa

SEQ ID NO: 174 - DNA, 2332 bp, Homo sapiens
gtctgcatagaaagaccaacaaccagcaccacttccttgctttttccagccatgaatgcttccagtcggaatgtgtttgacacgttgatcagggtgttgacagaaagtatgttcaaacatcttcggaaatgggtcgtcactcgcttttttgggcattctcggcaaagagcaaggctagtctccaaagatggaaggtgcaacatagaatttggcaatgtggaggcacagtcaaggtttatattctttgtggacatctggacaacggtacttgacctcaagtggagatacaaaatgaccattttcatcacagccttcttggggagttggtttttctttggtctcctgtggtatgcagtagcgtacattcacaaagacctcccggaattccatccttctgccaatcacactccctgtgtggagaatattaatggcttgacctcagcttttctgttttctctggagactcaagtgaccattggatatggattcaggtgtgtgacagaacagtgtgccactgccatttttctgcttatctttcagtctatacttggagttataatcaattctttcatgtgtggggccatcttagccaagatctccaggcccaaaaaacgtgccaagaccattacgttcagcaagaacgcagtgatcagcaaacggggagggaagctttgcctcctaatccgagtggctaatctcaggaagagccttcttattggcagtcacatttatggaaagcttctgaagaccacagtcactcctgaaggagagaccattattttggaccagatcaatatcaactttgtagttgacgctgggaatgaaaatttattcttcatctccccattgacaatttaccatgtcattgatcacaacagccctttcttccacatggcagcggagacccttctccagcaggactttgaattagtggtgtttttagatggcacagtggagtccaccagtgctacctgccaagtccggacatcctatgtcccagaggaggtgctttggggctaccgttttgctcccatagtatccaagacaaaggaagggaaataccgagtggatttccataactttagcaagacagtggaagtggagacccctcactgtgccatgtgcctttataatgagaaagatgttagagccaggatgaagagaggctatgacaaccccaacttcatcttgtcagaagtcaatgaaacagatgacaccaaaatgtaacagtggcttttcaacgggagtaaagcaaagtctctaaagctcctagtacctagaagcattatgaagcagtcaacaatttaggggtacgaaagtaggatgagagccttcaaagtctaccagcacaaagacccctgagccccgcaattgtgatcccacaagacatgcatctccacaaggctactgtattagaacgtgcaatgcatttatatgaaactggtgtatggaagacataggtgctctcttgaaatcttaaatatgattatttgagctcatataaggtggattggagcagataaaattatcaaaagtttcatgaacaggccaaacaaaatattttttaaagtttccttaaagaagttatgaactttagaaaggatcaggggacaataataatctcattttgattctactgataagaatgactccacttttaatgtggacttttactcatggaaaaattgtctcctaatttggggagatgaaccaaccaatcaatgacaagaaaacgcttacacaaagaacaatttgaggctctaagcttctcatgtggtacgtttagacagaggctaaatctgcacactagaatcttgatgataccttcctgcaagacagaatgctttagttaaaagtggtgatgatatttctttcaatctgtattggatggcttaaagggctataaatctgtttataaagagcatttcctgctcttcgaagacagcaatgaggagttggaaggtgcaaagtcagtagagaagggaatgtatcattaatgcacctgagaagaaacagtttcatgtgttcctccacctagagtttgtactggaatgctatttctaaagaagaagtgggaaagagagaggaatgggatggagccccacagtcagaatgttactatgtctttctttccctgacagcccatcttcctaaaagggaccagcttatggaaggctcgaccttgaggggaaagttttactgtgaaagtcttcttcagatccccacctgcatcattccgaatgtgtcctggaaaaaaactggtactcaaagctgcttaggaatcaaaatgttttcagtgtgttgattaatatagtaaatttctgaaactgtg

SEQ ID NO: 175 - DNA, 2475 bp, Homo sapiens
ccggaggagtccgagaggaagcggaggcgcgagctggaggcggcggctcccgtcggcctccggcaggactgagcgctgggaggccggaaggcgggcgcgcacggcggagaggcgggcgggaggccggagcatattaatgaaaagtgccataaactgaaaaaccaaacatgagggtagcaggtgctgcaaagttggtggtagctgtggcagtgtttttactgacattttatgttatttctcaagtatttgaaataaaaatggatgcaagtttaggaaatctatttgcaagatcagcattggacacagctgcacgttctacaaagcctcccagatataagtgtgggatctcaaaagcttgccctgagaagcattttgcttttaaaatggcaagtggagcagccaacgtggtgggacccaaaatctgcctggaagataatgttttaatgagtggtgttaagaataatgttggaagagggatcaatgttgccttggcaaatggaaaaacaggagaagtattagacactaaatattttgacatgtggggaggagatgtggcaccatttattgagtttctgaaggccatacaagatggaacaatagttttaatgggaacatacgatgatggagcaaccaaactcaatgatgaggcacggcggctcattgctgatttggggagcacatctattactaatcttggttttagagacaactgggtcttctgtggtgggaagggcattaagacaaaaagcccttttgaacagcacataaagaacaataaggatacaaacaaatatgaaggatggcctgaagttgtagaaatggaaggatgcatcccccagaagcaagactaatggaaatgtggagagaattgaagaaagcgcactttcactcttaatgggagagctataaatggcagagctatgtgtaaatattttaagagcatgcagccatcttggtgtgtgcatgagtattgtctcttttgatatcaggattatttattgctaacgtaaatagatagcattgtaaataatcatcacaatgatcaaatcactgaaccatgtctccgcacatttccctaaaagtacaatgtttagactgctatggtaatacatattttaaattctaaaagcatacacaatgtgtaactgaatggtttgtgaaaaatatattgatatatatactagttgctatgaaaatatcatggaataatagggattttagggtggatactttattttcttttatgtttctatatgttgcgttgtgatgacattatcttttaaattaaaaagagatttggctagttgtgtgtgtaatgttactttacagtccgactctcctgatgtacctcttttcatgatctttttctttccttcccaagaaactgaggaatgtttaatatgaaaacatacatcggatatgtgaaaagcacaacaaaattcttaatgtacacagtaaaaaagtaaatatataaatgtagatggcatttaggaccacagcttgctggatttgtgttagctatgggaataacttgattttgtataagctatttagagtgaggctggaggtggcagcttcacagaactggagaaccaggccaagtcccctccccaacctaattaggtcattcaggacagctaagtcagtatatttagagcaatactagcatacgtttttcttaattgttatcagcattgaccaagtggtttggaaggaggcatgctttaatatcacaataattttgatttgtaaaccaagaaattaatcctgtgtttatctaacttcataatagcaattattgcccgaagctatagtggcatatttacaaaagttcttattactgggcggactgataacatttaaaaaataattgtgtttgaccccaaatgactttatacccaattctacataaaaatatagaagatctatctttttttgttaccttcagatgttcactaaataactcagtttttaagcagaagttttcagggcattaaatatatgttgtgtatgaagtatctcaaactggaacataaatttagtgatcaaactgccattcacagtgtaaggcagcacttaaatttcgaacctaaagtttagatgcattgtataaaaaaacctaaaagcagtatctgttatttagctgtaaaccaagttggaagctattcggataatttcttaaatattgatgaactttggagtactgtttcttccttcaaactgaatgtaattaattcatgaataaatgcaccttatatgtttaaacaatctttgtatacttttgggatttttggtgcttatatgctaaatcacattcagcatgtgtattttgacatttaaaatacttccctcaattctgtaaattaaaagaatagttattttacagttccagggattgtgaaataaatgttgcagttttttaaaataatgaaaataaatactcttggttttgctttgtgaaaaaaaaaaaaaaaa

SEQ ID NO: 176 - DNA, 2849 bp, Homo sapiens
cagcggcttcctgctttctgcacgtcctcgccgccgcgccgccagtccgtttgtgctagctctggccgtgagccggccgcccgctgccgccggccgccccgcagctgcctgcgccccagccgcgcctcgcggccagcccggctagctcaggtccgctcccggagcccgcgcccctccacgctgccccctgcctgtccccggccatgctgtcccttcagtaccccgacgtgtaccgcgacgagaccgccgtacaggattatcatggtcataaaatttgtgacccttacgcctggcttgaagaccccgacagtgaacagactaaggcctttgtggaggcccagaataagattactgtgccatttcttgagcagtgtcccatcagaggtttatacaaagagagaatgactgaactatatgattatcccaagtatagttgccacttcaagaaaggaaaacggtatttttatttttacaatacaggtttgcagaaccagcgagtattatatgtacaggattccttagagggtgaggccagagtgttcctggaccccaacatactgtctgacgatggcacagtggcactccgaggttatgcgttcagcgaagatggtgaatattttgcctatggtctgagtgccagtggctcagactgggtgacaatcaagttcatgaaagttgatggtgccaaagagcttccagatgtgcttgaaagagtcaagttcagctgtatggcctggacccatgatgggaagggaatgttctacaactcataccctcaacaggatggaaaaagtgatggcacagagacatctaccaatctccaccaaaagctctactaccatgtcttgggaaccgatcagtcagaagatattttgtgtgctgagtttcctgatgaacctaaatggatgggtggagctgagttatctgatgatggccgctatgtcttgttatcaataagggaaggatgtgatccagtaaaccgactctggtactgtgacctacagcaggaatccagtggcatcgcgggaatcctgaagtgggtaaaactgattgacaactttgaaggggaatatgactacgtgaccaatgaggggacggtgttcacattcaagacgaatcgccagtctcccaactatcgcgtgatcaacattgacttcagggatcctgaagagtctaagtggaaagtacttgttcctgagcatgagaaagatgtcttagaatggatagcttgtgtcaggtccaacttcttggtcttatgctacctccatgacgtcaagaacattctgcagctccatgacctgactactggtgctctccttaagaccttcccgctcgatgtcggcagcattgtagggtacagcggtcagaagaaggacactgaaatcttctatcagtttacttcctttttatctccaggtatcatttatcactgtgatcttaccaaagaggagctggagccaagagttttccgagaggtgaccgtaaaaggaattgatgcttctgattaccagacagtccagattttctaccctagcaaggatggtacgaagattccaatgttcattgtgcataaaaaaggcataaaattggatggctctcatccagctttcttatatggctatggcggcttcaacatatccatcacacccaactacagtgtttccaggcttatttttgtgagacacatgggtggtatcctggcagtggccaacatcagaggaggtggcgaatatggagagacgtggcataaaggtggtatcttggccaacaaacaaaactgctttgatgactttcagtgtgctgctgagtatctgatcaaggaaggttacacatctcccaagaggctgactattaatggaggttcaaatggaggcctcttagtggctgcttgtgcaaatcagagacctgacctctttggttgtgttattgcccaagttggagtaatggacatgctgaagtttcataaatataccatcggccatgcttggaccactgattatgggtgctcggacagcaaacaacactttgaatggcttgtcaaatactctccattgcataatgtgaagttaccagaagcagatgacatccagtacccgtccatgctgctcctcactgctgaccatgatgaccgcgtggtcccgcttcactccctgaagttcattgccacccttcagtacatcgtgggccgcagcaggaagcaaagcaaccccctgcttatccacgtggacaccaaggcgggccacggggcggggaagcccacagccaaagtgatagaggaagtctcagacatgtttgcgttcatcgcgcggtgcctgaacgtcgactggattccataaacagttttcgtgcttcctcctgacagcgacagaaaacctcaagggctttcccacgttgacaccaagaaaccactgggcataatgcttccccacgggaacattattcctgcactcacaggctacagttgaacagaactgccgtgggaattttatcttttttaggcttctcctttttagcaaggccttggtgtttctttttccaccctgtctaggcacatgtggttttttggtgttttttttaagggcatgttgggataaatagctaaatggcaacaaacacattgtgaatattagattgctgaattaaggatcatagtcgggcatacttatctatatccataacctctatatctttaaataaatgtgagaactgttctcatggagaagacttctttgcaacaataataaatgttatttaagaatgacaggcttttacttccggtttcttcatattgaggggcaactccagaagtggagttttctgtgagaataaagcatttcacctttctgcaa

SEQ ID NO: 177 - DNA, 2423 bp, Homo sapiens
cccgctggtcgctgccggacggcgtgggcggtggccgcgcagcagctgatgctgagcgcggcgctgcggaccctgaagcatgttctgtactattcaagacagtgcttaatggtgtcccgtaatcttggttcagtgggatatgatcctaatgaaaaaacttttgataaaattcttgttgctaatagaggagaaattgcatgtcgggttattagaacttgcaagaagatgggcattaagacagttgccatccacagtgatgttgatgctagttctgttcatgtgaaaatggcggatgaggctgtctgtgttggcccagctcccaccagtaaaagctacctcaacatggatgccatcatggaagccattaagaaaaccagggcccaagctgtacatccaggttatggattcctttcagaaaacaaagaatttgccagatgtttggcagcagaagatgtcgttttcattggacctgacacacatgctattcaagccatgggcgacaagattgaaagcaaattattagctaagaaagcagaggttaatacaatccctggctttgatggagtagtcaaggatgcagaagaagctgtcagaattgcaagggaaattggctaccctgtcatgatcaaggcctcagcaggtggtggtgggaaaggcatgcgcattgcttgggatgatgaagagaccagggatggttttagattgtcatctcaagaagctgcttctagttttggcgatgatagactactaatagaaaaatttattgataatcctcgtcatatagaaatccaggttctaggtgataaacatgggaatgctttatggcttaatgaaagagagtgctcaattcagagaagaaatcagaaggtggtggaggaagcaccaagcatttttttggatgcggagactcgaagagcgatgggagaacaagctgtagctcttgccagagcagtaaaatattcctctgctgggaccgtggagttccttgtggactctaagaagaatttttatttcttggaaatgaatacaagactccaggttgagcatcctgtcacagaatgcattactggcctggacctagtccaggaaatgatccgtgttgctaagggctaccctctcaggcacaaacaagctgatattcgcatcaacggctgggcagttgaatgtcgggtttatgctgaggacccctacaagtcttttggtttaccatctattgggagattgtctcagtaccaagaaccgttacatctacctggtgtccgagtggacagtggcatccaaccaggaagtgatattagcatttattatgatcctatgatttcaaaactaatcacatatggctctgatagaactgaggcactgaagagaatggcagatgcactggataactatgttattcgaggtgttacacataatattgcattacttcgagaggtgataatcaactcacgctttgtaaaaggagacatcagcactaaatttctctccgatgtgtatcctgatggcttcaaaggacacatgctaaccaagagtgagaagaaccagttattggcaatagcatcatcattgtttgtggcattccagttaagagcacaacattttcaagaaaattcaagaatgcctgttattaaaccagacatagccaactgggagctctcagtaaaattgcatgataaagttcataccgtagtagcatcaaacaatgggtcagtgttctcggtggaagttgatgggtcgaaactaaatgtgaccagcacgtggaacctggcttcgcccttattgtctgtcagcgttgatggcactcagaggactgtccagtgtctttctcgagaagcaggtggaaacatgagcattcagtttcttggtacagtgtacaaggtgaatatcttaaccagacttgccgcagaattgaacaaatttatgctggaaaaagtgactgaggacacaagcagtgttctgcgttccccgatgcccggagtggtggtggccgtctctgtcaagcctggagacgcggtagcagaaggtcaagaaatttgtgtgattgaagccatgaaaatgcagaatagtatgacagctgggaaaactggcacggtgaaatctgtgcactgtcaagctggagacacagttggagaaggggatctgctcgtggagctggaatgaaggatttataacctttcagtcatcacccaatttaattagccatttgcatgatgctttcacacacaattgattcaagcattatacaggaacacccctgtgcagctacgtttacgtcgtcatttattccacagagtcaagaccaatattctgccaaaaaatcaccaatggaaattttcatgatataaatacttgtactatagatgtacttctgctgtgagattccctagtgtcaaaattaaatcaataaaactgagcatttgtct

SEQ ID NO: 178 - DNA, 1590 bp, Homo sapiens
atgagagacggcttctcatcatggcggaccctagagataaggcgcttcaggactaccgcaagaagttgcttgaacacaaggagatcgacggccgtcttaaggagttaagggaacaattaaaagaacttaccaagcagtatgaaaagtctgaaaatgatctgaaggccctacagagtgttgggcagatcgtgggtgaagtgcttaaacagttaactgaagaaaaattcattgttaaagctaccaatggaccaagatatgttgtgggttgtcgtcgacagcttgacaaaagtaagctgaagccaggaacaagagttgctttggatatgactacactaactatcatgagatatttgccgagagaggtggatccactggtttataacatgtctcatgaggaccctgggaatgtttcttattctgagattggagggctatcagaacagatccgggaattaagagaggtgatagaattacctcttacaaacccagagttatttcagcgtgtaggaataatacctccaaaaggctgtttgttatatggaccaccaggtacgggaaaaacactcttggcacgagccgttgctagccagctggactgcaatttcttaaaggttgtatctagttctattgtagacaagtacattggtgaaagtgctcgtttgatcagagaaatgtttaattatgctagagatcatcaaccatgcatcatttttatggatgaaatagatgctattggtggtcgtcggttttctgagggtacttcagctgacagagagattcagagaacgttaatggagttactgaatcaaatggatggatttgatactctgcatagagttaaaatgatcatggctacaaacagaccagatacactggatcctgctttgctgcgtccaggaagattagatagaaaaatacatattgatttgccaaatgaacaagcaagattagacatactgaaaatccatgcaggtcccattacaaagcatggtgaaatagattatgaagcaattgtgaagctttcggatggctttaatggagcagatctgagaaatgtttgtactgaagcaggtatgttcgcaattcgtgctgatcatgattttgtagtacaggaagacttcatgaaagcagtcagaaaagtggctgattctaagaagctggagtctaaattggactacaaacctgtgtaatttactgtaagatttttgatggctgcatgacagatgttggcttattgtaaaaataaagttaaagaaaataatgtatgtattggcaatgatgtcattaaaagtatatgaataaaaatatgagtaacatcataaaaattagtaattcaacttttaagatacagaagaaatttgtatgtttgttaaagttgcatttattgcagcaagttacaaagggaaagtgttgaagcttttcatatttgctgcgtgagcattttgtaaaatattgaaagtggtttgagatagtggtataagaaagcatttcttatgacttattttgtatcatttgttttcctcatctaaaaagttgaataaaatctgtttgattcagttctcctacatataaaaaaaaaaaaaaaaaaaa

SEQ ID NO: 179 - DNA, 1525 bp, Homo sapiens
agaggcggagctccaactgacatgttcattaagggcagggctccgagggcgccacctcgagagcgacggcgggctacccggggcgggctgaggcaggttgtagccccgccccgggccttgggctccacctctcggccccacttccgccgggcaagcgtttgtaggcggcgctgccgtaaatcaggcggtctgcttgccgcatcacgcaagatggcggccgcggcggtgaacggggcggcaggcttctcgagctccgggcccgcggcaacctcgggcgctgttctgcaggccgcgaccggcatgtacgagcaactcaagggcgagtggaaccgtaaaagccccaatcttagcaagtgcggggaagagctgggtcgactcaagctagttcttctggagctcaacttcttgccaaccacagggaccaagctgaccaaacagcagctaattctggcccgtgacatactggagatcggggcccaatggagcatcctacgcaaggacatcccctccttcgagcgctacatggcccagctcaaatgctactactttgattacaaggagcagctccccgagtcagcctatatgcaccagctcttgggcctcaacctcctcttcctgctgtcccagaaccgggtggctgagttccacacggagttggagcggctgcctgccaaggacatacagaccaatgtctacatcaagcacccagtgtccctggagcaatacctgatggagggcagctacaacaaagtgttcctggccaagggtaacatccccgccgagagctacaccttcttcattgacatcctgctcgacactatcagggatgagatcgctgggtgcatcgagaaggcctacgagaaaatccttttcactgaggccacccggatcctcttcttcaacacacccaaaaagatgacagactacgccaagaagcgagggtgggtcctgggccccaacaactactacagttttgccagccagcagcagaagccggaagacaccaccattccctccacagaactggccaaacaggtcatcgagtatgcccggcagctggagatgatcgtctgagccccccgggcactgggtggggcagggcacgagttatttaaaacagttacactgcagggtttcgcccaataaaggtggactgacattccctcttccaggcccttgtctccccagttgggacggcagagagacaagttcttatatctgaagaacttggaggttttggggcattcaggagttggagatagcctccaactgggtcagcctctgtctggtgggcattgctcagggtctcaaacatggacgcccactgtggggccccagcagcactgtggcctgcaggagggcatggccccaggtagggggactgttctagccagctgtggacacataggaatgctggaccagggtaccagattttttcaacaaagggggtgaagtgtcctactaaaaagaataaatgttggcagtgaattaaacaatttttcaaatgaaaaaaaaaaaaaaaaaa

SEQ ID NO: 180 - DNA, 1734 bp, Homo sapiens
atgcaaggaagaggcggatatcatcacggattcgacggaccgaagcgctatcgtcgagatgataatgcggacccaacaaatccaaatccatcgatagtggtccacgttcgaaatcttcatcaaaaagtaaccgaggccgatcttctcgaagctctcagtaattttggaccagttgcatatgcaacatgcataccgcattctcgaatggctcttgttgagtttgaggatattgaaggagcgaaagcatgcgttaatttcgccacatcaaaccaaatcaacgtcggtgggcagggtgctctattcaattactcaacatctcaatgtatcgagcgaatgggattcgagtcagcaactccaaacaaagtcttggttgtaacagttctaaatgctcaatatcccatcgatgccgatgtcatctaccagatttctaatgcacaaggaaaggtgcttcgtgttgctgtaatgcacaagccaactgtagttcaagccttagttgaatttgaaagcatggaagttgcgaaagcagcgaaacacgcaatgaatggagctgatatctattctggttgttgtactcttaaagttgaatttgccaagccggatcgagttcgtgttcaacgtcaggacaaagatcaacgagacttcactcttccagataatagacgtccatatgaagacgatcggaatcattacgatcgtcatgactatcaagctccatcttcatatggatattcttcacgcggaggaggtcattcagactattacggtggtgatcgtggaggaccaccacatccaccaccgtctcgttatcgtgatgactatgaagacagaggatatgctcagccggcgggtggaggtccaggatgtgtgatgatgatctatggtctcgaacacggaaagatcaattgtgacatgctattcaatattctttgtcaatatggaaacgtcctccggatcagcttcatgcgcacaaaaactgaaactggaataattgaattgggaactccagaagagcgacaaaatgttcttgatttcttgcaaggatcagcattgtttgggctaacattggaattcaaaccaagtcatcaagaatgtgttcatcatcttcgtgatccattccttcttcccgatggttcaccatctttcaaggactactcttcatctcgaaatcagagattttccactcctgagctcgctgccaagaatcgtatcattttcccaacaaatacacttcattggttcaatgctcctggaactatggatgaacaagctctgctcgatttgatggctgaaaaaactgagcacaaaccagtaaaaatcgacatcttcccatcaagaaatgaacgatcagccgccggaactgctgaatttgaaactgtcgagattgctaacgaagttctggctcttgttaatcatactccagtgaatagtccatatggaagtgctccattcattgtaaaatgggcatacgctactcctcgccgatgggatggtagtggcggtgaaccgccccgatatgaagaaggtggagatggagagagaaaagaaggattcattcagcctgcacatagaccatctccgtcattccgtggacgtggtcgaggctatggtgattcaggtttccgtcgagagtcataccgaggtggattgcatggaagtgatcgttatgggccatatccaccacgaggcggtggattcagaggaggaagaggcagaggtcgttttgatggatattga

SEQ ID NO: 181 - DNA, 1187 bp, Homo sapiens
aggcggagctgggtgcgagcgccctaccgctttcgctttcccttcgcggtgcccactccactccttgtgcggcgctaggccccccgtcccggtcatggccatgctcagggtccagcccgaggcccaagccaaggtggatgtgtttcgtgaagacctctgtaccaagacagagaacctgctcgggagctatttccccaagaagatttctgagctggatgcatttttaaaggagccagctctcaatgaagccaacttgagcaatctgaaggccccattggacatcccagtgcctgatccagtcaaggagaaagagaaagaggagcggaagaaacagcaggagaaggaagacaaggatgaaaagaagaagggggaggatgaagacaaaggtcctccctgtggcccagtgaactgcaatgaaaagatcgtggtccttctgcagcgcttgaagcctgagatcaaggatgtcattgagcagctcaacctggtcaccacctggttgcagctgcagatacctcggattgaggatggtaacaattttggagtggctgtccaggagaaggtgtttgagctgatgaccagcctccacaccaagctagaaggcttccacactcaaatctctaagtatttctctgagcgtggtgatgcagtgactaaagcagccaagcagccccatgtgggtgattatcggcagctggtgcacgagctggatgaggcagagtaccgggacatccggctgatggtcatggagatccgcaatgcttatgtgaggaggcaagggcagggcaggggtgggcagaggcagctttcccaggccacccactccctgaccctgcaggctaggggttaagggtgacaaagctcagcttctccacaaggctagaaatggggcacagagccactggaggcctctgactgacctctactccctggccctgtaggctgtgttatatgacatcatcctgaagaacttcgagaagctcaagaagcccaggggagaaacaaagggaatgatctattgagagccctctctcccattctgtgatgagtacagcagagaccttcctgctttttactggggactccagattttccccaaacttgcttctgttgagatttttccctcaccttgcctctcaggcacaataaatatagttataccactgcccatcaaaaaaaaaaaaaaaaaa

SEQ ID NO: 182 - DNA, 1238 bp, Homo sapiens
aaactcccgcagacttctctgtagatcgctgagcgatactttcggcagcacctccttgattctcagttttgctggaggccgcaaccaggcccgcgccgccaccatgtttcgaaatcagtatgacaatgatgtcactgtttggagcccccagggcaggattcatcaaattgaatatgcaatggaagctgttaaacaaggttcagccacagttggtctgaaatcaaaaactcatgcagttttggttgcattgaaaagggcgcaatcagagcttgcagctcatcagaaaaaaattctccatgttgacaaccatattggtatctcaattgcggggcttactgctgatgctagactgttatgtaattttatgcgtcaggagtgtttggattccagatttgtattcgatagaccactgcctgtgtctcgtcttgtatctctaattggaagcaagacccagataccaacacaacgatatggccggagaccatatggtgttggtctccttattgctggttatgatgatatgggccctcacattttccaaacctgtccatctgctaactattttgactgcagagccatgtccattggagcccgttcccaatcagctcgtacttacttggagagacatatgtctgaatttatggagtgtaatttaaatgaactagttaaacatggtctgcgtgccttaagagagacgcttcctgcagaacaggacctgactacaaagaatgtttccattggaattgttggtaaagacttggagtttacaatctatgatgatgatgatgtgtctccattcctggaaggtcttgaagaaagaccacagagaaaggcacagcctgctcaacctgctgatgaacctgcagaaaaggctgatgaaccaatggaacattaagtgataagccagtctatatatgtattatcaaatatgtaagaatacaggcaccacatactgatgacaataatctatactttgaaccaaaagttgcagagtggtggaatgctatgttttaggaatcagtccagatgtgagttttttccaagcaacctcactgaaacctatataatggaatacatttttctttgaaagggtctgtataatcattttctagaaagtatgggtatctatactaatgtttttatatgaagaacataggtgtctttgtggttttaaagacaactgtgaaataaaattgtttcaccgcctggtaaaaaaaaaaaaaaaaaaaaaaaaaaaa

SEQ ID NO: 183 - DNA, 849 bp, Homo sapiens
acagttgctttgaggcagtaccggaggagaaagatggcggctaccttactagctgctcggggagccgggccagcaccggcttgggggccggaggcgttcactccagactgggaaagccgagaagtttccactgggaccactatcatggccgtgcagtttgacgggggcgtggttctgggggcggactccagaacaaccactgggtcctacatcgccaatcgagtgactgacaagctgacacctattcacgaccgcattttctgctgtcgctcaggctcagctgctgatacccaggcagtagctgatgctgtcacctaccagctcggtttccacagcattgaactgaatgagcctccactggtccacacagcagccagcctctttaaggagatgtgttaccgataccgggaagacctgatggcgggaatcatcatcgcaggctgggaccctcaagaaggagggcaggtgtactcagtgcctatggggggtatgatggtaaggcagtcctttgccattggaggctccgggagctcctacatctatggctatgttgatgctacctaccgggaaggcatgaccaaggaagagtgtctgcaattcactgccaatgctctcgctttggccatggagcgggatggctccagtggaggagtgatccgcctggcagccattgcagagtcaggggtagagcggcaagtacttttgggagaccagatacccaaattcgccgttgccactttaccacccgcctgaatcctgggattctagtatgcaataagagatgccctgtactgatgcaaaatttaataaagtttgtcacagagaaaaaaaaaaaaaaaaaaaaaaaaa

SEQ ID NO: 184 - DNA, 978 bp, Homo sapiens
agtgccgtagcgcccggctcctgcaggcgctcggcctccgctcattcctgaccccgcagtgggcgcgatggcggaggctgtactgagggtcgcccggcggcagctgagccagcgcggcgggtctggagcccccatcctcctgcggcagatgttcgagcctgtgagctgcaccttcacgtacctgctgggtgacagagagtcccgggaggccgttctgatcgacccagtcctggaaacagcgcctcgggatgcccagctgatcaaggagctggggctgcggctgctctatgctgtgaatacccactgccacgcggaccacattacaggctcggggctgctccgttccctcctccctggctgccagtctgtcatctcccgccttagtggggcccaggctgacttacacattgaggatggagactccatccgcttcgggcgcttcgcgttggagaccagggccagccctggccacaccccaggctgtgtcaccttcgtcctgaatgaccacagcatggccttcactggagatgccctgttgatccgtgggtgtgggcggacagacttccagcaaggctgtgccaagaccttgtaccactcggtccatgaaaagatcttcacacttccaggagactgtctgatctaccctgctcacgattaccatgggttcacagtgtccaccgtggaggaggagaggactctgaaccctcggctcaccctcagctgtgaggagtttgtcaaaatcatgggcaacctgaacttgcctaaacctcagcagatagactttgctgttccagccaacatgcgctgtggggtgcagacacccactgcctgatctcacttctgtcagatgctcccatccactattaatgcactaggtgggaggagagggcggcaatgacactgcacctctcctttcccaccgcattccctggagctccctaaataaaactttttttaacgtgaaaaaaaaaaaaaaaa

SEQ ID NO: 185 - DNA, 1839 bp, Homo sapiens
agtgtccccggagccgcgagctgggagcgctgtgccgggagccgggagccgagcgcgccgggctggggccggggccggagcggagcggagagggagcgcgcccgccccagccccgagtcccgccgccttccctcccgccgcagcgcgggcccaccggccgccgccccagccatggagcaagacaacagcccccaaaagatccagttcacggtcccgctgctggagccgcaccttgaccccgaggcggcggagcagattcggaggcgccgccccacccctgccaccctcgtgctgaccagtgaccagtcatccccagagatagatgaagaccggatccccaacccacatctcaagtccactttggcaatgtctccacggcaacggaagaagatgacaaggatcacacccacaatgaaagagctccagatgatggttgaacatcacctggggcaacagcagcaaggagaggaacctgagggggccgctgagagcacaggaacccaggagtcccgcccacctgggatcccagacacagaagtggagtcaaggctgggcacctctgggacagcaaaaaaaactgcagaatgcatccctaaaactcacgaaagaggcagtaaggaacccagcacaaaagaaccctcaacccatataccaccactggattccaagggagccaactcggtctgagagaggaggaggtatcttgggatcaagactgcagtttgggaatgcatggacaccggatttgtttcttattccttcacttttggggaaaatctcttgtttttaaaaagtgataaatttggtgttaggtccttggcactttccttcttttccaactgggagaatcctttctccctgccttcttgccctgccctctctgtagcccccaccctcctgccaagctgcctctgggaaggaagaaacaggagctaggcagaagccttgagcagggaagagttcttcccttagccctgactttacttgctgtgggaagagagatgagggtcagataggtgggaggactaacttccagggtgccaagaaggaagaaaagccccaggttctcttttcttattgaggaacgatccgaccacctcacaggcctgccctgcagctggaagactcggcgctctaaggcctgtgccgtgtccagctgtgactgtgcggtgggctccatctgctggacaaaaggggaactgcaccatggcacttggcccatgggaaagagggtgtggtggtgtgccaatacctcctcgcctgccctccaagccccagctgccttccttttggattcccaagcttcaggatgtgttccctcttccagctgtgggaccgctgtcccttatttcaacccgttagcaacaatggatagagaacacagtggctattaatgaagaggcccatgctggagactggaagggttcccttgtcctagacattgaggggcccagataagaccaaaaccaagcataagagaagaaactgtctcagatctcacggccaggcctctctcctgctgctgtttttgattttcccaggtagtgggagagaggaaaggagggaaggcaagattctttccccctccctgctgaagcatgtggtacagaggcaagagcagagcctgagaagcgtcaggtcccacttctgccatgcagctactatgagccctcggggcctcctcctgggcctcagcttgcccagatacatacctaaatatatatatatatatatgagggagaacgcctcacccagattttatcatgctggaaagagtgtatgtatgtgaagatgcttggtcaacttgtacccagtgaacacacaaaaaaaaaaaaaaaa

SEQ ID NO: 186 - DNA, 1599 bp, Homo sapiens
actcttgggaaaactgctgggcaccgtcgtcgcgctgaaggtggttctgtacctgctccgagtgtgcttagcgatggcctggaaatccggcggcgccagccactcggagctaatccacaatctccgcaaaaatggaatcatcaagacagataaagtatttgaagtgatgctggctacagaccgctcccactatgcaaaatgtaacccatacatggattctccacaatcaataggtttccaagcaacaatcagtgctccacacatgcatgcatatgcgctagaacttctatttgatcagttgcatgaaggagctaaagctcttgatgtaggatctggaagtggaatccttactgcatgttttgcacgtatggttggatgtactggaaaagtcataggaattgatcacattaaagagctagtagatgactcagtaaataatgtcaggaaggacgatccaacacttctgtcttcagggagagtacagcttgttgtgggggatggaagaatgggatatgctgaagaagccccttatgatgccattcatgtgggagctgcagcccctgttgtaccccaggcgctaatagatcagttaaagcccggaggaagattgatattgcctgttggtcctgcaggcggaaaccaaatgttggagcagtatgacaagctacaagatggcagcatcaaaatgaagcctctgatgggggtgatatacgtgcctttaacagataaagaaaagcagtggtccaggtggaagtgattttatcttctgctctttcttcttccacacatgcaagggatgaattgtaaaagcaacatcagcttgaccagtataaaattacagtggattgctcatctcagtcctcaaagctttttgaaaaccaacaccatcacagcttgttttggactttgttacactgttattttcagcatgaaaatgtgtgtttttttagggtttctgattcttcaaagaggcacagagccaaattggtagaggaaggatgcaaagtataaatttgtgtaatattactttaacatgcccatattttacttggaaatattaaaagaaagggttctgtaaaatggaaaacttagtttgtgaattgattttgaggagtggtttttcttttcttggacacttaattctgttctgatattaatttatcagattgcttttgtgcattggataacaccaccattcacaagttaagattcttggtatttggatatctgttagatgctactaagaaaatagagatgagctttctttttaaagcttttgatgtggtgtcatagaatagcatgttgtagatacaatcagctgctttgttaccttaaaactaggcatttgtaaatattaaaccttaagatggcaggtgatgtcctgtaaacactcagctgttcagattggacataactgacttagttcttcccttctctctctctcaaaattataggagacttgtagtttagtgtggttttctgtttctaatttgctgctgataatgtatatgaacttaacatgctgtgtaagctgtgtcctagttcttgaacagtttatgcagtgctgctttgccaaataaagttaaaagtaaaagaggc

SEQ ID NO: 187 - DNA, 870 bp, Homo sapiens
aggttggaactattgaagcccgctttcaggttcttttccccattttccctttgaaaggaagacttctggcttctcctaaatctccgttctctgggtaaggggagtccaagcctctgtcatgaggaacggaaatgcgagggcctcgggtgttactctaaaatccgccctcagcttgcacgccggaagctgcgattcctgcagcggaagaggcgtgatctggccttcgactcgctatgtccactaacaatatgtcggacccacggaggccgaacaaagtgctgaggtacaagcccccgccgagcgaatgtaacccggccttggacgacccgacgccggactacatgaacctgctgggcatgatcttcagcatgtgcggcctcatgcttaagctgaagtggtgtgcttgggtcgctgtctactgctccttcatcagctttgccaactctcggagctcggaggacacgaagcaaatgatgagtagcttcatgctgtccatctctgccgtggtgatgtcctatctgcagaatcctcagcccatgacgcccccatggtgataccagcctagaagggtcacattttggaccctgtctatccactaggcctgggctttggctgctaaacctgctgccttcagctgccatcctggacttccctgaatgaggccgtctcggtgcccccagctggatagagggaacctggccctttcctagggaacaccctaggcttacccctcctgcctcccttcccctgcctgctgctgggggagatgctgtccatgtttctaggggtattcatttgctttctcgttgaaacctgttgttaataaagtttttcactctgaaaaaaaaaaaaaaaaaaaaaaaaaaaaaa

SEQ ID NO: 188 - DNA, 1959 bp, Homo sapiens
gagaattggctatatcctggagcgagtgctgggaggtgctagtccgccgcgccttattcgagaggtgtcagggctgggagactaggatgtcggacacgtggagctctatccaggcccacaagaagcagctggactctctgcgggagaggctgcagcggaggcggaagcaggactcggggcacttggatctacggaatccagaggcagcattgtctccaaccttccgtagtgacagcccagtgcctactgcacccacctctggtggccctaagcccagcacagcttcagcagttcctgaattagctacagatcctgagttagagaagaagttgctacaccacctctctgatctggccttaacattgcccactgatgctgtgtccatctgtcttgccatctccacgccagatgctcctgccactcaagatggggtagaaagcctcctgcagaagtttgcagctcaggagttgattgaggtaaagcgaggtctcctacaagatgatgcacatcctactcttgtaacctatgctgaccattccaagctctctgccatgatgggtgctgtggcagaaaagaagggccctggggaggtagcagggactgtcacagggcagaagcggcgtgcagaacaggactcgactacagtagctgcctttgccagttcgttagtctctggtctgaactcttcagcatcggaaccagcaaaggagccagccaagaaatcaaggaaacatgctgcctcagatgttgatctggagatagagagccttctgaaccaacagtccactaaggaacaacagagcaagaaggtcagtcaggagatcctagagctattaaatactacaacagccaaggaacaatccattgttgaaaaatttcgctctcgaggtcgggcccaagtgcaagaattctgtgactatggaaccaaggaggagtgcatgaaagccagtgatgctgatcgaccctgtcgcaagctgcacttcagacgaattatcaataaacacactgatgagtctttaggtgactgctctttccttaatacatgtttccacatggatacctgcaagtatgttcactatgaaattgatgcttgcatggattctgaggcccctggcagcaaagaccacacgccaagccaggagcttgctcttacacagagtgtcggaggtgattccagtgcagaccgactcttcccacctcagtggatctgttgtgatatccgctacctggacgtcagtatcttgggcaagtttgcagttgtgatggctgacccaccctgggatattcacatggaactgccctatgggaccctgacagatgatgagatgcgcaggctcaacatacccgtactacaggatgatggctttctcttcctctgggtcacaggcagggccatggagttggggagagaatgtctaaatctctgggggtatgaacgggtagatgaaattatttgggtgaagacaaatcaactgcaacgcatcattcggacaggccgtacaggtcactggttgaaccatgggaaggaacactgcttggttggtgtcaaaggaaatccccaaggcttcaaccagggtctggattgtgatgtgatcgtagctgaggttcgttccaccagtcataaaccagatgaaatctatggcatgattgaaagactatctcctggcactcgcaagattgagttatttggacgaccacacaatgtgcaacccaactggatcacccttggaaaccaactggatgggatccacctactagacccagatgtggttgcacggttcaagcaaaggtacccagatggtatcatctctaaacctaagaatttatagaagcacttccttacagagctaagaatccatagccatggctctgtaagctaaacctgaagagtgatatttgtacaatagctttcttctttatttaaataaacatttgtattgtaaaaaaaaaaaaaaaaaa

SEQ ID NO: 189 - DNA, 1324 bp, Homo sapiens
cggcacgagcgccgccgaggattcagcagcctcccccttgagccccctcgcttcccgacgttccgttcccccctgcccgccttctcccgccaccgccgccgccgccttccgcaggccgtttccaccgaggaaaaggaatcgtatcgtatgtccgctatccagaacctccactctttcgacccctttgctgatgcaagtaagggtgatgacctgcttcctgctggcactgaggattatatccatataagaattcaacagagaaacggcaggaagacccttactactgtccaagggatcgctgatgattacgataaaaagaaactagtgaaggcgtttaagaaaaagtttgcctgcaatggtactgtaattgagcatccggaatatggagaagtaattcagctacagggtgaccaacgcaagaacatatgccagttcctcgtagagattggactggctaaggacgatcagctgaaggttcatgggttttaagtgcttgtggctcactgaagcttaagtgaggatttccttgcaatgagtagaatttcccttctctcccttgtcacaggtttaaaaacctcacagcttgtataatgtaaccatttggggtccgcttttaacttggactagtgtaactccttcatgcaataaactgaaaagagccatgctgtctagtcttgaagtccctcatttaaacagaggtcaagcaataggcgcctggcagtgtcaagcctgaaaccaagcaataccgtcatgtttcagccaagcccagagccctaagattacaaacaactatggccggaacctcctcagctctccctctgcagagttccctaccctaagagaatgttaccacctgaacagtcctcggtgaatctgagaggagaggatggggtaaggcagaagcaccagctgtactactagaagggagcttttggtggtagatcccctggtgtctccaacctgactaggtggacagagctcaaagaggccctcttaccgctagcgaggtgataggacatctggcttgccacaaaggtctgttcgaccagacatatcctagctaagggatgtccaaacatcagaatgtgaggccaaccttctatcagagttaaacttttgacaagggaacaaatctcaaactgatccatcagtcatgtagctagctgtagagcttgcaacttaatagcagcagctgcccaatgccatgtgaagtaacaaactggtttttggtttttttttccccttcagttttaatgttatgtgtaatgtatttaaacccttatttaaataaaacttgttttcagaaaaaaaaaaaaaaaaaaaa

SEQ ID NO: 190 - DNA, 1501 bp, Homo sapiens
atagaggacacgaccaagatggcggcggtgtctggcttggtgcggagaccccttcgggaggtctccgggctgctgaagaggcgctttcactggaccgcgccggctgcgctgcaggtgacagttcgtgatgctataaatcagggtatggatgaggagctggaaagagatgagaaggtatttctgcttggagaagaagttgcccagtatgatggggcatacaaggttagtcgagggctgtggaagaaatatggagacaagaggattattgacactcccatatcagagatgggctttgctggaattgctgtaggtgcagctatggctgggttgcggcccatttgtgaatttatgaccttcaatttctccatgcaagccattgaccaggttataaactcagctgccaagacctactacatgtctggtggccttcagcctgtgcctatagtcttcaggggacccaatggtgcctcagcaggtgtagctgcccagcactcacagtgctttgctgcctggtatgggcactgcccaggcttaaaggtggtcagtccctggaattcagaggatgctaaaggacttattaaatcagccattcgggataacaatccagtggtggtgctagagaatgaattgatgtatggggttccttttgaatttctcccggaagctcagtcaaaagattttctgattcctattggaaaagccaaaatagaaaggcaaggaacacatataactgtggtttcccattcaagacctgtgggccactgcttagaagctgcagcagtgctatctaaagaaggagttgaatgtgaggtgataaatatgcgtaccattagaccaatggacatggaaaccatagaagccagtgtcatgaagacaaatcatcttgtaactgtggaaggaggctggccacagtttggagtaggagctgaaatctgtgccaggatcatggaaggtcctgcgttcaatttcctggatgctcctgctgttcgtgtcactggtgctgatgtccctatgccttatgcaaagattctagaggacaactctatacctcaggtcaaagacatcatatttgcaataaagaaaacattaaatatttagtttggacttgaatatcaagtcgttgaaatttatttgaaatacttgctggcactgcacctggatttgtactgcaagacctgactattcataaaggaaaacgatttctaaagcaacagcaggtatttttgtacagggaagtttaaatgtgtttgtgtatggaaaactctccactctcctcccctagatgccatgcttccttttgtctgttacggttgccatgttctttgaataacaaattatatcacattttatcctctctcaccacaaggacaaagtatggatgtggcagagtcctgatgaaagatgtatccaaacaagataacttatatgtataaaattaaagcatataatacacatttactgttagtttgttttgataaggaataaaggaatttctaacatg

SEQ ID NO: 191 - DNA, 2809 bp, Homo sapiens
gagaggcgcacccgggcggccagctgggctcggagcggaacggggtcaggatggacgaggacgtgctaaccaccctgaagatcctcatcatcggcgagagtggggtgggcaagtccagcctgctcttgaggttcacagatgatacgtttgatccagaacttgcagcaacaataggtgttgactttaaggtgaaaacaatttcagtggatggaaataaggctaaacttgcaatatgggatactgctggtcaagagaggtttagaacattaactcccagctattatagaggtgcacagggtgttatattagtttatgatgtcacaagaagagatacatttgttaaactggataattggttaaatgaattggaaacatactgtacaagaaatgacatagtaaacatgctagttggaaataaaatcgataaggaaaatcgtgaagtcgatagaaatgaaggcctgaaatttgcacgaaagcattccatgttatttatagaggcaagtgcaaaaacctgtgatggtgtacaatgtgcctttgaagaacttgttgaaaagatcattcagacccctggactgtgggaaagtgagaaccagaataaaggagtcaaactgtcacacagggaagaaggccaaggaggaggagcctgtggtggttattgctctgtgttataaactctgggaaattccatctcttgcatatttgatcagatagtgacatctttctgtatataaactctttaactgctattttagggaccttgcagtttgcacataattgttttatatcatagcagtaaatatttgcaagaaatcccactcatcgaccccgggtaaaatgttatggtaagcatgcacagtttgcagtctacagtttttttatgtagcacaaaataggtgtacctttataagtacattcaattttatgatttacatttatcatgtaatttttaaaaaaatccatctatctaggatatgttgatacaaagtctgcttttgctattctttttgcttaaatactcctatcattttctgaattacttggtatttagaactcctagcaccacggggaagaatagaggtatcatcaaacgtggcaaattttctttcaggaataataaagagcatgattccacagcttttctgggatgtttgagattcttttttagtactaagcaaaattctcatcacagaatgtagcccaggccaatttataactaaatctctatttgttcggatgatgcttctaaaacagcattgataggttaaagaagcttggtatttttaatttacttcaatgattagctcagttgcttaactggagttttaatcctgtgatatgtacattggattcatgactgtgcagcatttttagttatgtggtgtttggcagaatgacaataaggttttcccccattttggtttcaggaggacatgaatagtgtgtttattgtaactcctcatacacttttaaaaccaacatcttttttcataaatgttggtagtgtttgtccaggtaccttaactgtagcttgtgtaatgttgatgaatatctgtatcttacggcttccataatggctagttgatattcaaaaacctatttctgtgttttgaggggtggggaaaaaaaacactaagtgataatttgaaaaaggcatattgcttccagattctgatgtgtgagggaaaatactgtcacaatgaaaatcttgacaatttacttaacaagtaaccagtagttcatcaaaaccaacttgtacagactaataaatctttttcacagtattcagttttctcacctcttgctattgtatattgtagatttttttcattcatgtgttatttaatttacactgatctctgctattttaaccccccaaataagttatttgtcctttaaggttggttactataatacccctcagtaagattccagtattaatttctgggcagtttgttctctgtatacaattgcaaatgataagcatttttgtgagtgaccacctttgcaatatgtttgttaatttacttcatgttgggttctttctgaaatgtacatctttacatataaaaacctcacattctacttgatttacacttcctagtctacattacatgtggttgaaggttttatacattctatatgcttttactaaatatacaagatttactactagaaatttggagaaagaacactaacacatgtacttgtgatttgttcatgttatattaaaacttgagatttgtgtatttatgtagagtctgtattgacaagactgttgttttttgctccttgagctatataataatctgtgtattggattgttgtcttgatttggtctaaatttgaatatatatgagttacttgaatataacaaaaatgaattttgtttgatagatttatattgtaacctttttctagttcttgaataaatatagcctgctttccctagatgcatttgtgtaggaagtatatacatttccctattactctcatcagctgaagaatatgtactattgtgttactcaaattatgtggctttcattttgttgttttgttgcaagcttagtgttttgtagtggaggttttgtaaatgaaacagttgtaatatctaaggtcaggcacctagtaacagggttttgttaattcttttcagaatcattgaagcagtcttaaagggtcttttgcagatggtacaaattagaacaattagaatatagtattttgagttctagtagtactgagattgacccaaacaaataaaaaactattcaatttctgagtaatagttaaaaaaaaaaaaaaaaaaaaa

SEQ ID NO: 192 - DNA, 1128 bp, Homo sapiens
cctcctctccctggcttttgtgttggtgcctccgagctgcaaggagggtgcgctggaggaggaggaggggggcccggagtgagaggcacccccttcacgcgcgcgcgcgcacacggtgccggcgcacgcacacacgggcggacacacacacacgcgcgcacacacacacgcacagagctcgctcgcctcgagcgcacgaacgtggacgttctctttgtgtggagccctcaaggggggttggggccccggttcggtccgggggagatggcgcagcccatcctgggccatgggagcctgcagcccgcctcggccgctggcctggcgtccctggagctcgactcgtcgctggaccagtacgtgcagattcgcatcttcaaaataatcgtgattggggactccaacgtgggcaagacctgcctgaccttccgcttctgcgggggtaccttcccagacaagactgaagccaccatcggcgtggacttcagggagaagaccgtggaaatcgagggcgagaagatcaaggttcaggtgtgggacacagcaggtcaggaacgtttccgcaaaagcatggtcgagcattactaccgcaacgtacatgccgtggtcttcgtctatgacgtcaccaagatgacatctttcaccaacctcaaaatgtggatccaagaatgcaatgggcatgctgtgcccccactagtccccaaagtgcttgtgggcaacaagtgtgacttgagggaacagatccaggtgccctccaacttagccctgaaatttgctgatgcccacaacatgctcttgtttgagacatcggccaaggaccccaaagagagccagaacgtggagtcgattttcatgtgcttggcttgccgattgaaggcccagaaatccctgctgtatcgtgatgctgagaggcagcaggggaaggtgcagaaactggagttcccacaggaagctaacagtaaaacttcctgtccttgttgaaaccaaacgatataaatacaagataaattatcactggagttttttctttcccttttttctgtgcctgcataatgctgacacctgcttgtttccatacaaattgatatcaaaataaaatttgtatagattaaaaaaaaaaaaaaaaaaaaa

SEQ ID NO: 193 - DNA, 3164 bp, Homo sapiens
acctgtataccttttgaaacgtcacagtctctaatcgtgaacgatttggggcggagggctgaacaatgtgttttctagtgtgtcgaggtgtttataggctatgtgtgcctccaaactgtaaagtagtccagtatactttccaatgtataagtttgtagaccttaaacttttcttctggctaacttaaaatcgttgaattcactagtttgcataaacatttaagaatttgaaaacacggttgaaaaacagtgttaccaagaaattttgtaataacatgttcaaatgaagacaaaaattttacagtttaagacttaaattcttcgtccacagcaagtgaattcatggtattttacttttttgggaaatactggaaatgaagacctgcaactgtaatttgaaataaggaaaactttaattttcagtataaaaattgctcaaatagaattgcctgattttaatgacaaaagtatatgggagtccacatttatgtaagaaatgaaactataaaatgtataaataatttgcaaatcagaattgctgtcgaaagttttactataatgaaagatattttcatactctcaaaaatatagaggaaaggggccaagattatagtaccagtcacaatcttttgatgaggacgaaatgaatcaggtaacagactgggttgacccatcatttgatgattttctagagtgtagtggcgtctctactattactgccacatcattaggtgtgaataactcaagtcatagaagaaaaaatgggccttctacattagaaagcagcagatttccagcgagaaaaagaggaaatctatcttccttagaacagatttatggtttagaaaattcaaaagaatatctgtctgaaaatgaaccatgggtggataaatataaaccagaaactcagcatgaacttgctgtgcataaaaagaaaattgaagaagtcgaaacctggttaaaagctcaagttttagaaaggcaaccaaaacagggtggatctattttattaataacaggtcctcctggatgtggaaagacaacgaccttaaaaatactatcaaaggagcatggtattcaagtacaagagtggattaatccagttttaccagacttccaaaaagatgatttcaaggggatgtttaatactgaatcaagcttccatatgtttccctatcagtctcagatagcagttttcaaagagtttctactaagagcgacaaagtataacaagttacaaatgcttggagatgatctgagaactgataagaagataattctggttgaagatttacctaaccagttttatcgggattctcatactttacatgaagttctaaggaagtatgtgaggattggtcgatgtcctcttatatttataatctcggacagtctcagtggagataataatcaaaggttattgtttcccaaagaaattcaggaagagtgttctatctcaaatattagtttcaaccctgtggcaccaacaattatgatgaaatttcttaatcgaatagtgactatagaagctaacaagaatggaggaaaaattactgtccctgacaaaacttctctagagttgctctgtcagggatgttctggtgatatcagaagtgcaataaacagcctccagttttcttcttcaaaaggagaaaacaacttacggccaaggaaaaaaggaatgtctttaaaatcagatgctgtgctgtcaaaatcaaaacgaagaaaaaaacctgatagggtttttgaaaatcaagaggtccaagctattggtggcaaagatgtttctctgtttctcttcagagctttggggaaaattctatattgtaaaagagcatctttaacagaattagactcacctcggttgccctctcatttatcagaatatgaacgggatacattacttgttgaacctgaggaggtagtagaaatgtcacacatgcctggagacttatttaatttatatcttcaccaaaactacatagatttcttcatggaaattgatgatattgtgagagccagtgaatttctgagttttgcagatatcctcagtggtgactggaatacacgctctttactcagggaatatagcacatctatagctacgagaggtgtgatgcattccaacaaagcccgaggatatgctcattgccaaggaggaggatcaagttttcgacccttgcacaaacctcagtggtttctaataaataaaaagtatcgggaaaattgcctggcagcaaaagcactttttcctgacttctgcctaccagctttatgcctccaaactcagctattgccataccttgctctactaaccattccaatgagaaatcaagctcagatttcttttatccaagatattggaaggctccctctgaagcgacactttggaagattgaaaatggaagccctgactgacagggaacatggaatgatagaccctgacagcggagatgaagcccagcttaatggaggacattctgcagaggaatctctgggtgaacccactcaagccactgtgccggaaacctggtctcttcctttgagtcagaatagtgccagtgaactgcctgctagccagccccagcccttttcagcccaaggagacatggaagaaaacataataatagaagactacgagagtgatgggacatagaagccagcctgctaatcagattgctacttcacagcttcatttttgtttcattcagtggtacttcagcagagttaatatgcttttctgatgaattacacaacagtttgttaattcttcattcttgtagtatttcatcacaagaaacctactcttctgtcatcttgaagtaaatagaagatcaagccttcaaatctcttaattttttcggtatttattaaatctgtgagtggtttaaggagcggtcagtgtgtataaagtgtgtttgaacattatgccaaatatcaagatgtgaaggactaattcaggatgcaaaaacgttattggggggttgtaaatatcaactattcaacagtttaggatgcaattacgagtgtaaactgtgtgccttatttacactttattgtctcccgcttctcagatagttttgatgtgttgtacagtggaatatcttagatactttttggaaagtatttacataagttatatcacaattaaaatgttgaatttaa

SEQ ID NO: 194 - DNA, 3647 bp, Homo sapiens
agtgaatcggaaaggaggcgccggctgtggcggcggcgggagctgctcggaagctacacctcgcaagggctcccccctttccccaccccctcccccgacccttttcccctccccgggccacccagcccgcccaactcccagcggagagcaaggttttcttctgttttcatagccagccagaacaatgttctacgcacattttgttctcagtaaaagagggcctctggccaaaatttggctagcggcccattgggataagaagctaaccaaagcccatgtgttcgagtgtaatttagagagcagcgtggagagtatcatctcaccaaaggtgaaaatggcattacggacatcaggacatctcttactgggagtagttcgaatctatcacaggaaagccaaataccttcttgcagactgtaatgaagcattcattaagataaagatggcttttcggccaggtgtggttgacctgcctgaggaaaatcgggaagcagcttataatgccattactttacctgaagaatttcatgactttgatcagccactgcctgacttagatgacatcgatgtggcccagcagttcagcttgaatcagagtagagtggaagagataaccatgagagaagaagttgggaacatcagtattttacaagaaaatgattttggtgattttggaatggatgatcgtgagataatgagagaaggcagtgcttttgaggatgacgacatgttagtaagcactactacttctaacctcctattagagtctgaacagagcaccagcaatctgaatgagaaaattaaccatttagaatatgaagatcaatataaggatgataattttggagaaggaaatgatggtggaatattagatgacaaacttattagtaataatgatggcggtatctttgatgatccccctgccctctctgaggcaggggtgatgttgccagagcagcctgcacatgacgatatggatgaggatgataatgtatcaatgggtgggcctgatagtcctgattcagtggatcccgttgaaccaatgccaaccatgactgatcaaacaacacttgttccaaatgaggaagaagcatttgcattggagcctattgatataactgttaaagaaacaaaagccaagaggaagaggaagctaattgttgacagtgtcaaagagttggatagcaagacaattagagcccaacttagtgattattcagatattgttactactttggatctggcaccgcccaccaagaaattgatgatgtggaaagagacaggaggagtagaaaaactgttttctttacctgctcagcctttgtggaataacagactactgaagctctttacacgctgtcttacaccgcttgtaccagaagaccttagaaaaaggaggaaaggaggagaggcagataatttggatgaattcctcaaagaatttgaaaatccagaggttcctagagaggaccagcaacagcagcatcagcagcgtgatgttatcgatgagcccattattgaagagccaagccgcctccaggagtcagtgatggaggccagcagaacaaacatagatgagtcagctatgcctccaccaccacctcagggagttaagcgaaaagctggacaaattgacccagagcctgtgatgcctcctcagcaggtagagcagatggaaataccacctgtagagcttcccccagaagaacctccaaatatctgtcagctaataccagagttagaacttctgccagaaaaagagaaggagaaagagaaggaaaaagaagatgatgaagaggaagaggatgaagatgcatcagggggcgatcaagatcaggaagaaagaagatggaacaaaaggactcagcagatgcttcatggtcttcagcgtgctcttgctaaaactggagctgaatctatcagtttgcttgagttatgtcgaaatacgaacagaaaacaagctgccgcaaagttctacagcttcttggttcttaaaaagcagcaagctattgagctgacacaggaagaaccgtacagtgacatcatcgcaacacctggaccaaggttccatattatataaggagctagaagcattatagctagtgtttgattcactagtgcttacaaattgcccccatgtgtaggggacacagaaccctttgagaaaacttagatttttgtctgtacaaagtctttgcctttttccttcttcatttttttccagtacattaaatttgtcaatttcatctttgagggaaactgattagatgggttgtgtttgtgttctgatggagaaaacagcaccccaaggactcagaagatgattttaacagttcagaacagatgtgtgcaatattggtgcatgtaataatgttgagtggcagtcaaaagtcatgatttttatcttagttcttcattactgcattgaaaaggaaaacctgtctgagaaaatgcctgacagtttaatttaaaactatggtgtaagtctttgacaagaaaaaaaaacaaacaaacacttctttccatcagtaacactggcaatcttcctgttaaccactctccttagggatggtatctgaaacaacaatggtcaccctcttgagattcgttttaagtgtaattccataatgagcagaggtgtacgcgaaattgtgttatgactgatagccttcagctacaaaaagataggactgacctggtttaaagtgttctattttgtaaatcattccatttgagtctttctgatgaacttggctatactgaaatctgttattttagtgaggctccaaaatgagcaaagctaggcctgattagagtagagtgactattaaaaaacataactttctaggagctataaatcaaagttttaaaaagatgtttggatatatttgagtattccgatcatgaaaacagaaattgccctgcctactacaaggacagactgatgggaaattatgcacctggtcaacttagcttttaagcagacgatgctgtaaaaactaacggcttctctgatatttattgtaagttttagtactgatctccttttccagtgctgcacactcctggtttggaactttaatagcgttgcaacgaaatcctatatccagtttcctgtaatttaattgaagaaaaatacatccaaataaagactttattattaacagaccagatagcatcagaaatcatgtgactgttatgattatcagaatatgtcttaactttttagggcaaagttaacactgaaagttctagcttaagtgttgaaacttttgtgggaaaaaaaaatcacttttgaaactcagacttcagtgtatacccaataatttaaaattatgtgaaatgttttaaatttgtgaactcgtaattactgttttaatgattcagtttcttcagagtggtaattgtataaaattgctattgcagctttatattcaatatgatgtgcctgtaaaccaaggagttttccccgtttgtaaaaagacattgtagataattgaatgtttgattttagaaaggtcattagtttcttgttacacattttgttagtctggtttttgttgcttatcgggtttaatattgttcttgaaaatagttgatgctatgttatgtataacttttctaataaaagttgtgttataagctgt

SEQ ID NO: 195 - DNA, 6557 bp, Homo sapiens
agagggcaaggagagagcagagaacacactttgccttctctttggtattgagtaatatcaaccaaattgcagacatctcaacactttggccaggcagcctgctgagcaaggtacctcagccagcatggcagcctctttcccacccaccttgggactcagttctgccccagatgaaattcagcacccacatattaaattttcagaatggaaatttaagctgttccgggtgagatcctttgaaaagacacctgaagaagctcaaaaggaaaagaaggattcctttgaggggaaaccctctctggagcaatctccagcagtcctggacaaggctgatggtcagaagccagtcccaactcagccattgttaaaagcccaccctaagttttcaaagaaatttcacgacaacgagaaagcaagaggcaaagcgatccatcaagccaaccttcgacatctctgccgcatctgtgggaattcttttagagctgatgagcacaacaggagatatccagtccatggtcctgtggatggtaaaaccctaggccttttacgaaagaaggaaaagagagctacttcctggccggacctcattgccaaggttttccggatcgatgtgaaggcagatgttgactcgatccaccccactgagttctgccataactgctggagcatcatgcacaggaagtttagcagtgccccatgtgaggtttacttcccgaggaacgtgaccatggagtggcacccccacacaccatcctgtgacatctgcaacactgcccgtcggggactcaagaggaagagtcttcagccaaacttgcagctcagcaaaaaactcaaaactgtgcttgaccaagcaagacaagcccgtcagcgcaagagaagagctcaggcaaggatcagcagcaaggatgtcatgaagaagatcgccaactgcagtaagatacatcttagtaccaagctccttgcagtggacttcccagagcactttgtgaaatccatctcctgccagatctgtgaacacattctggctgaccctgtggagaccaactgtaagcatgtcttttgccgggtctgcattctcagatgcctcaaagtcatgggcagctattgtccctcttgccgatatccatgcttccctactgacctggagagtccagtgaagtcctttctgagcgtcttgaattccctgatggtgaaatgtccagcaaaagagtgcaatgaggaggtcagtttggaaaaatataatcaccacatctcaagtcacaaggaatcaaaagagatttttgtgcacattaataaagggggccggccccgccaacatcttctgtcgctgactcggagagctcagaagcaccggctgagggagctcaagctgcaagtcaaagcctttgctgacaaagaagaaggtggagatgtgaagtccgtgtgcatgaccttgttcctgctggctctgagggcgaggaatgagcacaggcaagctgatgagctggaggccatcatgcagggaaagggctctggcctgcagccagctgtttgcttggccatccgtgtcaacaccttcctcagctgcagtcagtaccacaagatgtacaggactgtgaaagccatcacagggagacagatttttcagcctttgcatgcccttcggaatgctgagaaggtacttctgccaggctaccaccactttgagtggcagccacctctgaagaatgtgtcttccagcactgatgttggcattattgatgggctgtctggactatcatcctctgtggatgattacccagtggacaccattgcaaagaggttccgctatgattcagctttggtgtctgctttgatggacatggaagaagacatcttggaaggcatgagatcccaagaccttgatgattacctgaatggccccttcactgtggtggtgaaggagtcttgtgatggaatgggagacgtgagtgagaagcatgggagtgggcctgtagttccagaaaaggcagtccgtttttcattcacaatcatgaaaattactattgcccacagctctcagaatgtgaaagtatttgaagaagccaaacctaactctgaactgtgttgcaagccattgtgccttatgctggcagatgagtctgaccacgagacgctgactgccatcctgagtcctctcattgctgagagggaggccatgaagagcagtgaattaatgcttgagctgggaggcattctccggactttcaagttcatcttcaggggcaccggctatgatgaaaaacttgtgcgggaagtggaaggcctcgaggcttctggctcagtctacatttgtactctttgtgatgccacccgtctggaagcctctcaaaatcttgtcttccactctataaccagaagccatgctgagaacctggaacgttatgaggtctggcgttccaacccttaccatgagtctgtggaagaactgcgggatcgggtgaaaggggtctcagctaaacctttcattgagacagtcccttccatagatgcactccactgtgacattggcaatgcagctgagttctacaagatcttccagctagagataggggaagtgtataagaatcccaatgcttccaaagaggaaaggaaaaggtggcaggccacactggacaagcatctccggaagaagatgaacctcaaaccaatcatgaggatgaatggcaactttgccaggaagctcatgaccaaagagactgtggatgcagtttgtgagttaattccttccgaggagaggcacgaggctctgagggagctgatggatctttacctgaagatgaaaccagtatggcgatcatcatgccctgctaaagagtgcccagaatccctctgccagtacagtttcaattcacagcgttttgctgagctcctttctacgaagttcaagtataggtatgagggaaaaatcaccaattattttcacaaaaccctggcccatgttcctgaaattattgagagggatggctccattggggcatgggcaagtgagggaaatgagtctggtaacaaactgtttaggcgcttccggaaaatgaatgccaggcagtccaaatgctatgagatggaagatgtcctgaaacaccactggttgtacacctccaaatacctccagaagtttatgaatgctcataatgcattaaaaacctctgggtttaccatgaaccctcaggcaagcttaggggacccattaggcatagaggactctctggaaagccaagattcaatggaattttaagtagggcaaccacttatgagttggtttttgcaattgagtttccctctgggttgcattgagggcttctcctagcaccctttactgctgtgtatggggcttcaccatccaagaggtggtaggttggagtaagatgctacagatgctctcaagtcaggaatagaaactgatgagctgattgcttgaggcttttagtgagttccgaaaagcaacaggaaaaatcagttatctgaaagctcagtaactcagaacaggagtaactgcaggggaccagagatgagcaaagatctgtgtgtgttggggagctgtcatgtaaatcaaagccaaggttgtcaaagaacagccagtgaggccagaaattggtcttgtggttttcatttttttcccccttgattgattatattttgtattgagatatgataagtgccttctatttcatttttgaataattcttcatttttataattttacatatcttggcttgctatataagattcaaaagagctttttaaatttttctaataatatcttacatttgtacagcatgatgacctttacaaagtgctctcaatgcatttacccattcgttatataaatatgttacatcaggacaactttgagaaaatcagtccttttttatgtttaaattatgtatctattgtaaccttcagagtttaggaggtcatctgctgtcatggatttttcaataatgaatttagaatacacctgttagctacagttagttattaaatcttctgataatatatgtttacttagctatcagaagccaagtatgattctttatttttactttttcatttcaagaaatttagagtttccaaatttagagcttctgcatacagtcttaaagccacagaggcttgtaaaaatataggttagcttgatgtctaaaaatatatttcatgtcttactgaaacattttgccagactttctccaaatgaaacctgaatcaatttttctaaatctaggtttcatagagtcctctcctctgcaatgtgttattctttctataatgatcagtttactttcagtggattcagaattgtgtagcaggataaccttgtatttttccatccgctaagtttagatggagtccaaacgcagtacagcagaagagttaacatttacacagtgctttttaccactgtggaatgttttcacactcatttttccttacaacaattctgaggagtaggtgttgttattatctccatttgatgggggtttaatgatttgctcaaagtcatttaggggtaataaatacttggcttggaaatttaacacagtccttttgtctccaaagcccttcttctttccaccacaaattaatcactatgtttataaggtagtatcagaatttttttaggattcacaactaatcactatagcacatgaccttgggattacatttttatggggcaggggtaagcggcttttaaatcatttgtgtgctctggctcttttgatagaagaaagcaacacaaaagctccaaagggccccctaaccctcttgtggctccagttatttggaaactatgatctgcatccttaggaatctgggatttgccagttgctggcaatgtagagcaggcatggaattttatatgctagtgagtcataatgatatgttagtgttaattagtttttcttcctttgattttattggccataattgctactcttcatacacagtatatcaaagagcttgataatttagttgtcaaaagtgcatcggcgacattatctttaattgtatgtatttggtgcttcttcagggattgaactcagtatctttcattaaaaaacacagcagttttccttgctttttatatgcagaatatcaaagtcatttctaatttagttgtcaaaaacatatacatattttaacattagtttttttgaaaactcttggttttgtttttttggaaatgagtgggccactaagccacactttcccttcatcctgcttaatccttccagcatgtctctgcactaataaacagctaaattcacataatcatcctatttactgaagcatggtcatgctggtttatagattttttacccatttctactctttttctctattggtggcactgtaaatactttccagtattaaattatccttttctaacactgtaggaactattttgaatgcatgtgactaagagcatgatttatagcacaacctttccaataatcccttaatcagatcacattttgataaaccctgggaacatctggctgcaggaatttcaatatgtagaaacgctgcctatggttttttgcccttactgttgagactgcaatatcctagaccctagttttatactagagttttatttttagcaatgcctattgcaagtgcaattatatactccagggaaattcaccacactgaatcgagcatttgtgtgtgtatgtgtgaagtatatctgggacttcagaagtgcaatgtatttttctcctgtgaaacctgaatctacaagttttctgccaagccactcaggtgcattgcagggaccagtgataatggctgatgaaaattgatgattggtcagtgaggtcaaaaggagccttgggattaataaacatgcactgagaagcaagaggaggagaaaaagatgtctttttcttccaggtgaactggaatttagttttgcctcagatttttttcccacaagatacagaagaagataaagatttttttggttgagagtgtgggtcttgcattacatcaaacagagttcaaattccacacagataagaggcaggatatataagcgccagtggtagttgggaggaataaaccattatttggatgcaggtggtttttgattgcaaatatgtgtgtgtcttcagtgattgtatgacagatgatgtattcttttgatgttaaaagattttaagtaagagtagatacattgtacccattttacattttcttattttaactacagtaatctacataaatatacctcagaaatcatttttggtgattattttttgttttgtagaattgcacttcagtttattttcttacaaataaccttacattttgtttaatggcttccaagagcctttttttttttgtatttcagagaaaattcaggtaccaggatgcaatggatttatttgattcaggggacctgtatttccatgtcaaatgttttcaaataaaatgaaatatgagtttcaatactttttatattttaatatttccttaatattatggttattgtccgccattttgttgtatattgtaaataaagtttagattgt

SEQ ID NO: 196 - DNA, 6455 bp, Homo sapiens
gaggaagcgattctggggtttctgtgttgaacggttcttgtccgcgaagatgcgcttcggcctctgtcaggggacttgaacgggcttagtgggcttcagccagcttttctccaccggttccccacggggaccccccccccccggccgttgcaatggcgggcgtggggccggggggctacgcggcggagttcgtgccaccgccagagtgccccgtctttgagccgagttgggaggagttcacagatccgctcagctttatcggccgcatccggcctttggcggagaaaaccggcatctgcaaaattcggccgcccaaggactggcagcctccatttgcctgtgaagtaaaaagctttcgtttcactccaagagtccagcgcctgaatgaacttgaggcaatgaccagagtgagattggatttcttggatcaactagcaaaattttgggaacttcaaggatctactctgaagatccctgtggtagagagaaaaatcctggatctgtatgctttgagcaagattgttgccagcaaaggaggttttgaaatggtcaccaaagagaagaaatggtctaaagtgggtagtcgcttgggatatctgccaggaaaaggaactgggtctcttttgaagtcacattatgaaagaattctctacccatatgagcttttccagtctggtgtgagccttatgggtgtgcagatgcctaatttagatcttaaagaaaaagtggagcctgaggttctcagcactgatacccaaacttccccagagccaggcacaaggatgaacattctgccgaagagaacaagacgtgtgaagactcagtcagaatctggagatgtgagtagaaacacggaactgaagaaacttcagatttttggggctgggcccaaggttgtgggcttggcaatgggaacaaaagataaagaagatgaggtcacccgaagacgaaaagttaccaacaggtcagacgcatttaacatgcaaatgagacaacggaaaggcactctctctgttaactttgttgatctctatgtttgtatgttttgtggtcggggaaacaatgaagataaattgcttttgtgtgatggatgtgatgacagctatcatacattttgtctaattcctccactacctgatgtgcccaaaggagactggaggtgtcctaaatgtgtcgccgaggaatgtagcaaacctcgagaagcctttggatttgaacaagctgtacgagagtatacacttcagagctttggagagatggcagataattttaagtctgattattttaatatgccagtccatatggttcccacagaactagtagaaaaggaattttggcggctggtaagcagcattgaagaagatgttattgtggaatatggagcagatatctcctcaaaagactttggaagtggatttccggtgaaggatgggcggagaaagattctgccagaagaagaggaatatgcactttctggttggaatttgaataacatgcctgtcctggaacagtctgttcttgcacatattaatgtggacatctctggtatgaaagtgccgtggctctatgtgggaatgtgcttctcttctttttgctggcacattgaggatcactggagttattccatcaactacttgcactggggggagccaaagacatggtatggtgtgccatctcatgctgcagagcaactggaggaggtgatgagagagctggcccccgagttatttgaatcccagcctgatcttctgcatcagttagttaccatcatgaaccccaacgtgctaatggagcatggtgtgcctgtgtacaggaccaatcagtgtgctggcgagtttgttgtgacatttcctcgtgcctatcactctggatttaaccagggctacaactttgctgaagctgtgaacttctgtactgctgactggttgcccattggacgtcaatgtgtaaatcattaccgacgcctaaggcgccactgtgtcttttcacacgaggaactaattttcaagatggcagcagatccagaatgcttagatgtggggctggctgccatggtctgcaaagaattgactctcatgactgaagaagaaacacgattaagagagtctgttgtacagatgggtgtcctgatgtcagaagaagaagtgtttgaacttgttcctgatgatgagcggcagtgttcagcatgcagaaccacatgttttctctctgctctcacatgttcctgtaatcctgagcggcttgtatgtctctaccatccaactgatctgtgcccctgccccatgcagaagaaatgtcttagatatcgctacccattagaagacctcccttctctgctatatggtgtaaaagtcagggcacagtcctatgacacttgggtcagtcgtgttacagaagcattgtctgctaacttcaaccacaaaaaagatttgattgaattgcgagtaatgctggaagatgctgaggataggaaatacccagagaatgatctctttcgaaaactcagggatgctgtaaaagaagctgagacctgtgcttctgtggctcagctgcttctgagcaaaaagcagaaacacagacagagcccagatagtgggaggactcggaccaaactgacagtggaagaattgaaggcctttgtccaacaactttttagtcttccgtgtgtcatcagccaagctcggcaagtaaagaatctgctagatgatgtggaagagtttcatgaacgtgctcaggaggccatgatggatgaaaccccagattcttccaaactccagatgttgatagatatgggctctagtctctatgtggaactccctgaattaccacgactgaagcaagagctacaacaggctcggtggttggacgaagtaagactgaccttatcagatccgcaacaagtcactttggatgtcatgaagaagctgatagactctggggtagggttggcaccccaccatgctgtggagaaagcaatggctgaactacaggagctccttacagtctctgaacgatgggaagaaaaggctaaggtctgcctacaggcaagaccgaggcacagtgtggcaagtttagaaagcattgtgaatgaagccaagaacattccagcctttctacccaatgtgttgtccttgaaagaagccttacaaaaggctcgagaatggaccgctaaagtggaagctattcagagtggcagcaattacgcttatttggagcagcttgagagcttgtctgcgaaaggacgccctattcctgtgcgtcttgaagcactgccgcaagtggaatcacaggtagcagcagcacgggcatggagagaacggactgggcggacgtttcttaagaagaattctagccatacattgttacaggtgctgagcccccggaccgacattggtgtatatgggagtggcaaaaataggaggaaaaaagtaaaagaactaatagaaaaagaaaaagaaaaggatctggacctggagcctctgagtgatctggaggaaggattggaggaaaccagagatacagccatggtggtggcagttttcaaagaacgggagcaaaaagagattgaagccatgcattctctcagagcagccaacctagccaagatgacaatggtggaccgcatagaagaagtaaaattttgcatttgccgcaagacagccagtgggtttatgctacagtgtgagctctgcaaagactggttccataacagctgtgttcctcttcctaaatcaagttcccaaaaaaaaggatccagctggcaagctaaagaagtaaaattcctttgccctctttgtatgcggtctcgaaggcccaggctagagactattctgtcactcctggtatcccttcagaagttgcccgtacggttgcctgaaggagaggccctgcagtgtttgacagaacgtgctatgagttggcaagatagagcgcggcaggctctagccacagatgaactatcctctgccctggccaaactatctgtgttgagccagcgtatggtggaacaggcggctcgagaaaaaactgaaaagatcatcagtgcagaactccaaaaagcagctgccaatccagacttacagggacacttacctagtttccagcagtctgcttttaaccgggtggtgagcagtgtgtcatcttctcctcgacaaacaatggactatgatgatgaagaaacagactctgatgaagacattcgagagacatatggctacgacatgaaggacacagccagtgtgaagtcctctagtagtcttgaacccaatcttttttgtgatgaagagattcccatcaaatccgaggaggtggtgacccacatgtggacagcaccttcattttgtgcagagcatgcttattcttctgcttctaagagttgttctcaagtattttttgggaaaggttctagcaccccaaggaaacaacctcggaagagccctttggtgccccgaagtttggaacctccagtgctggagttgtcacctggagctaaggcacaactggaagaacttatgatggttggagatctcctggaagtatctctggacgagactcaacacatatggcggattttgcaggccacacacccaccctctgaagacagattcttgcatatcatggaggatgacagcatggaagagaaaccactaaaagtgaaaggaaaggactcttcagagaagaaacggaaacggaagctagaaaaggtagagcaactttttggagaaggaaaacagaagtccaaggagttaaagaaaatggacaaacctagaaagaagaaattaaaattaggtgcagacaaatcaaagaagctgaataaactggccaagaaactagcaaaagaagaagagagaaagaaaaagaaggagaaggctgctgcagccaaagttgaacttgtgaaagagagcactgaaaagaaaagagagaaaaaggtgctggacatcccctcaaagtatgactggtcaggagcagaggagtctgatgatgagaatgctgtgtgcgcagaaccagactgccaaaggccctgcaaggacaagggagttgtatttgtaacgaagaagagagagataaaaaatattagttttaaaagtgtcctatgtgactgcttttctaaaaaggtagactgggtacaatgtgatggtggctgtgatgagtggtttcatcgggtttgtgtgggtgtatctccagaaatggctgaaaatgaagattacatctgtataaactgtgcaaagaagcaggggccagttagcccaggtccagcaccacctccttccttcataatgagctacaaactaccaatggaggatcttaaagagaccagttagcagatgcttggttagtttgggacatggggggacatggaccacattgagaccttagtcatcaagtagagtggtttatatcacttggaatgttgcttctaaagatgaatggccttcagagaaagtccccttagtgctggcttcctctttgcatggactctgtgggttacattgctctatcaacatatctatgcagagggtgtcttctttggtacaacagccaatatctcatgtctcctttgagtgtggtttactgcattaaggccagatgcttaattgagctctagggtggctggttagtattaatacattggtgtgctaacagggcatataggatgtggcttttgtccagctgatagtagttagaggcttacaacttaggagcagcaccaactgaaggtgctaattgcttggatctccttcattaggatagttggagagggattggagtaccactttcttccactgttaccaggtacttaatgccctaaagatacaactaggagtaacagggccaaagttatttctgttagacgtcaaggaatggtatcacagtctattgacctcagcgatttgtgcttgtttgtgctagaagaacatcccaaataggagaacctctcacaagctggggcaggtcaccttatctttgtaagatgaggatatcatctagatcagaaatctgactagattggattctgaggagaagaacctactacaaggcaaggagccgttttttggctttgaaaagtcttgctgtcttgggtctacattttagggaagagcaggtacatggatccaggcttctgccaaaaaaaaaaagagaagaagatgacgagtatgaccagtcgtactatcttactgagccacagtgatgcatgcttttcggggaaaacttcattcacaagtattccagacaccaggcttcaggcatggccatgagcaagaccagcaaataacagctttttcccttgcagccctgaccccaatgtctgctgtttccaacactggtgatttctaactacggcccacagcagatgctgttgaataacaccatggcttcatcagaggatgtggggttgtagtacctctgggtgatgaagttgttttagcaaatccatttttaaaaaaaaaaaaaaa

SEQ ID NO: 197 - DNA, 2057 bp, Homo sapiens
ggctgcgcctgcgtggttcgtcctcacgtggccgtcaagccctctagtgccttagattccagcgagctacgcaagcaatcctggcccagccgagcttgcttccccaaatcccgtaatccttgaccttattcccccaaagaagcggcctcccgggaaggagcgccctggcggagaagactcgaacggctcccacagccgggcgttgggggaaaggcatgaagaactcttgactgacagaaacggagggtgtgtccaaagttttgaggacggccgagcggcgctccaaaacccgtcctcacagcctcgccccgttcgcctcagctacaacaaatcatcgtcaacctgttccaccttctccagtctggtagcaaaaaggggtgtctcagaatctccggcctgtgaaactgtgaggggattcggccaagacgtcctcttccctctgcctcccacccaggccactcttcacctccaccatgagcctggacatccagagcctggacatccagtgtgaggagctgagcgacgctagatgggccgagctcctccctctgctccagcagtgccaagtggtcaggctggacgactgtggcctcacggaagcacggtgcaaggacatcagctctgcacttcgagtcaaccctgcactggcagagctcaacctgcgcagcaacgagctgggcgatgtcggcgtgcattgcgtgctccagggcctgcagaccccctcctgcaagatccagaagctgagcctccagaactgctgcctgacgggggccggctgcggggtcctgtccagcacactacgcaccctgcccaccctgcaggagctgcacctcagcgacaacctcttgggggatgcgggcctgcagctgctctgcgaaggactcctggacccccagtgccgcctggaaaagctgcagctggagtattgcagcctctcggctgccagctgcgagcccctggcctccgtgctcagggccaagccggacttcaaggagctcacggttagcaacaacgacatcaatgaggctggcgtccgtgtgctgtgccagggcctgaaggactccccctgccagctggaggcgctcaagctggagagctgcggtgtgacatcagacaactgccgggacctgtgcggcattgtggcctccaaggcctcgctgcgggagctggccctgggcagcaacaagctgggtgatgtgggcatggcggagctgtgcccagggctgctccaccccagctccaggctcaggaccctgtggatctgggagtgtggcatcactgccaagggctgcggggatctgtgccgtgtcctcagggccaaggagagcctgaaggagctcagcctggccggcaacgagctgggggatgagggtgcccgactgctgtgtgagaccctgctggaacctggctgccagctggagtcgctgtgggtgaagtcctgcagcttcacagccgcctgctgctcccacttcagctcagtgctggcccagaacaggtttctcctggagctacagataagcaacaacaggctggaggatgcgggcgtgcgggagctgtgccagggcctgggccagcctggctctgtgctgcgggtgctctggttggccgactgcgatgtgagtgacagcagctgcagcagcctcgccgcaaccctgttggccaaccacagcctgcgtgagctggacctcagcaacaactgcctgggggacgccggcatcctgcagctggtggagagcgtccggcagccgggctgcctcctggagcagctggtcctgtacgacatttactggtctgaggagatggaggaccggctgcaggccctggagaaggacaagccatccctgagggtcatctcctgaggctcttcctgctgctgctctccctggacgaccggcctcgaggcaaccctggggcccaccagcccctgccatgctctcaccctgcatatcctaggtttgaagagaaacgctcagatccgcttatttctgccagtatattttggacactttataatcattaaagcactttcttggcaggaaaaaaaaaaaaaaaaaaaa

SEQ ID NO: 198 - DNA, 1113 bp, Homo sapiens
gggttgctatgagacccgctcgagcggaggaccagcagccagcccgacgctgatggttcttacctcgtactaaaacctttgctttgacacagttttagagttgcttaatattcgagcaagcacctgacacgggtgactttctccttctttttttcctccggtccctcgggtaagatggaggtagaaaatgaagccagctgctccccgggcagcgcatcaggcgggtccagagagtacaaggtggtaatgctgggagcagggggagttggtaaaagcgcaatgacaatgcagtttattagtcatcagttccctgattatcatgaccctactatagaagatgcttataagacccaggtcaggattgacaatgagccagcttacttggacatcttggacactgctggccaggcagaattcacagccatgcgggagcagtacatgcgaggtggggaaggcttcatcatctgctactccgtcactgaccgtcaatcatttcaggaggctgccaagtttaaagagctcatttttcaggtccgccacacctatgaaattcccctggtgctggtgggtaacaaaattgatctggaacagttccgccaggtttctacagaagaaggcttgagtcttgcccaagaatataattgtggtttttttgagacctctgcagccctcagattctgtattgatgatgcttttcatggcttagtgagggaaattcgcaagaaggagtccatgccatccttgatggaaaagaaactgaagagaaaagacagcctgtggaagaagctcaaaggttctttgaagaagaagagagaaaatatgacatgatatctttgcttttgagttcctcacgctctctgaattttattagttggacaattccatatgtagcattctgcttcaatattatctctctatgtgtctctctctctttaaatatctgcctgtaggtaaaagcaagctctgcatatctgtacctcttgagatagttttgttttgcctttaacagttggatggattttgtcaatcagctggatatgctgtttagtttttacaacatagtactaaataaaattgacattccaattgcctcaaaaaaaaaaaaaaaaaaaa

SEQ ID NO: 199 - DNA, 6212 bp, Homo sapiens
ggaaaggggaacagttaaatttgtaatttgggttgtgtgaaaacttctttgggcctcataaacaaccacagaaccacaagttgggtagcctggcagtgtcagaagtctgaacccagcatagtggtcagcaggcaggacgaatcacactgaatgcaaaccacagggtttcgcagcgtggtgagcatcaccaacccacagccaaggcggcgctggcttttttttttttttaatctttaacaatttgaatatttgtttttacaaaggtgcattttttaatagggcttggggagtcccagaggtatccagcagaggggagaagaaagagagatgtagggctagaggggtgaggctgaaacagtgacctgtcttggttttcgctccgaaggtaaaagaaatcattgagtcccccgccttcagaagagggtgcattttcaggaggaagcgatggcttcagacagcatatttgagtcatttccttcgtacccacagtgcttcatgagagaatgcatacttggaatgaatccttctagagacgtccacgatgccagcacgagccgccgcttcacgccgccttccaccgcgctgagcccaggcaagatgagcgaggcgttgccgctgggcgccccggacgccggcgctgccctggccggcaagctgaggagcggcgaccgcagcatggtggaggtgctggccgaccacccgggcgagctggtgcgcaccgacagccccaacttcctctgctccgtgctgcctacgcactggcgctgcaacaagaccctgcccatcgctttcaaggtggtggccctaggggatgttccagatggcactctggtcactgtgatggctggcaatgatgaaaactactcggctgagctgagaaatgctaccgcagccatgaagaaccaggttgcaagatttaatgacctcaggtttgtcggtcgaagtggaagagggaaaagcttcactctgaccatcactgtcttcacaaacccaccgcaagtcgccacctaccacagagccatcaaaatcacagtggatgggccccgagaacctcgaagacatcggcagaaactagatgatcagaccaagcccgggagcttgtccttttccgagcggctcagtgaactggagcagctgcggcgcacagccatgagggtcagcccacaccacccagcccccacgcccaaccctcgtgcctccctgaaccactccactgcctttaaccctcagcctcagagtcagatgcaggatacaaggcagatccaaccatccccaccgtggtcctacgatcagtcctaccaatacctgggatccattgcctctccttctgtgcacccagcaacgcccatttcacctggacgtgccagcggcatgacaaccctctctgcagaactttccagtcgactctcaacggcacccgacctgacagcgttcagcgacccgcgccagttccccgcgctgccctccatctccgacccccgcatgcactatccaggcgccttcacctactccccgacgccggtcacctcgggcatcggcatcggcatgtcggccatgggctcggccacgcgctaccacacctacctgccgccgccctaccccggctcgtcgcaagcgcagggaggcccgttccaagccagctcgccctcctaccacctgtactacggcgcctcggccggctcctaccagttctccatggtgggcggcgagcgctcgccgccgcgcatcctgccgccctgcaccaacgcctccaccggctccgcgctgctcaaccccagcctcccgaaccagagcgacgtggtggaggccgagggcagccacagcaactcccccaccaacatggcgccctccgcgcgcctggaggaggccgtgtggaggccctactgaggcgccaggcctggcccggctgggccacgcgggccgccgccttcgcctccgggcgcgcgggcctcctgttcgcgacaagcccgccgggatcccgggccctgggcccggccaccgtcctggggccgagggcgcccgacggccaggatctcgctgtaggtcaggcccgcgcagcctcctgcgcccagaagcccacgccgccgccgtctgctggcgccccggccctcgcggaggtgtccgaggcgacgcacctcgagggtgtccgccggccccagcacccaggggacgcgctggaaagcaaacaggaagattcccggagggaaactgtgaatgcttctgatttagcaatgctgtgaataaaaagaaagattttatacccttgacttaactttttaaccaagttgtttattccaaagagtgtggaattttggttggggtggggggagaggagggatgcaactcgccctgtttggcatctaattcttatttttaatttttccgcaccttatcaattgcaaaatgcgtatttgcatttgggtggtttttatttttatatacgtttatataaatatatataaattgagcttgcttctttcttgctttgaccatggaaagaaatatgattcccttttctttaagttttatttaacttttcttttggacttttgggtagttgtttttttttgttttgttttgtttttttgagaaacagctacagctttgggtcatttttaactactgtattcccacaaggaatccccagatatttatgtatcttgatgttcagacatttatgtgttgataattttttaattatttaaatgtacttatattaagaaaaatatcaagtactacattttcttttgttcttgatagtagccaaagttaaatgtatcacattgaagaaggctagaaaaaaagaatgagtaatgtgatcgcttggttatccagaagtattgtttacattaaactccctttcatgttaatcaaacaagtgagtagctcacgcagcaacgtttttaataggatttttagacactgagggtcactccaaggatcagaagtatggaattttctgccaggctcaacaagggtctcatatctaacttcctccttaaaacagagaaggtcaatctagttccagagggttgaggcgggtgccaataattacatctttggagaggatttgatttctgcccagggatttgctcaccccaaggtcatctgataatttcacagatgctgtgtaacagaacacagccaaagtaaactgtgtaggggagccacatttacataggaaccaaatcaatgaatttaggggttacgattatagcaatttaagggccaccagaagcaggcctcgaggagtcaatttgcctctgtgtgcctcagtggagacaagtgggaaaacatggtcccacctgtgcgagaccccctgtcctgtgctgctcactcaacaacatctttgtgttgctttcaccaggctgagaccctaccctatggggtatatgggcttttacctgtgcaccagtgtgacaggaaagattcatgtcactactgtccgtggctacaattcaaaggtatccaatgtcgctgtaaattttatggcactatttttattggaggatttggtcagaatgcagttgttgtacaactcataaatactaactgctgattttgacacatgtgtgctccaaatgatctggtggttatttaacgtacctcttaaaattcgttgaaacgatttcaggtcaactctgaagagtatttgaaagcaggacttcagaacagtgtttgatttttattttataaatttaagcattcaaattaggcaaatctttggctgcaggcagcaaaaacagctggacttatttaaaacaacttgtttttgagttttcttatatatatattgattatttgttttacacacatgcagtagcactttggtaagagttaaagagtaaagcagcttatgttgtcaggtcgttcttatctagagaagagctatagcagatctcggacaaactcagaatatattcactttcatttttgacaggattccctccacaactcagtttcatatattattccgtattacatttttgcagctaaattaccataaaatgtcagcaaatgtaaaaatttaatttctgaaaagcaccattagcccatttcccccaaattaaacgtaaatgttttttttcagcacatgttaccatgtctgacctgcaaaaatgctggagaaaaatgaaggaaaaaattatgtttttcagtttaattctgttaactgaagatattccaactcaaaaccagcctcatgctctgattagataatcttttacattgaacctttactctcaaagccatgtgtggagggggcttgtcactattgtaggctcactggattggtcatttagagtttcacagactcttaccagcatatatagtatttaattgtttcaaaaaaaatcaaactgtagttgttttggcgataggtctcacgcaacacatttttgtatgtgtgtgtgtgtgcgtgtgtgtgtgtgtgtgtgaaaaattgcattcattgacttcaggtagattaaggtatctttttattcattgccctcaggaaagttaaggtatcaatgagacccttaagccaatcatgtaataactgcatgtgtctggtccaggagaagtattgaataagccatttctactgcttactcatgtccctatttatgatttcaacatggatacatatttcagttctttctttttctcactatctgaaaatacatttccctccctctcttccccccaatatctccctttttttctctcttcctctatcttccaaaccccactttctccctcctccttttcctgtgttctcttaagcagatagcacatacccccacccagtaccaaatttcagaacacaagaaggtccagttcttcccccttcacataaaggaacatggtttgtcagcctttctcctgtttatgggtttcttccagcagaacagagacattgccaaccatattggatctgcttgctgtccaaaccagcaaacttcctgggcaaatcacaatcagtgagtaaatagacagcctttctgctgccttgggtttctgtgcagataaacagaaatgctctgattagaaaggaaatgaatggttccactcaaatgtcctgcaatttaggattgcagatttctgccttgaaatacctgtttctttgggacattccgtcctgatgatttttatttttgttggtttttatttttggggggaatgacatgtttgggtcttttatacatgaaaatttgtttgacaataatctcacaaaacatattttacatctgaacaaaatgcctttttgtttaccgtagcgtatacatttgttttgggatttttgtgtgtttgttgggaattttgtttttagccaggtcagtattgatgaggctgatcatttggctctttttttccttccagaagagttgcatcaacaaagttaattgtatttatgtatgtaaatagattttaagcttcattataaaatattgttaatgcctataactttttttcaatttttttgtgtgtgtttctaaggactttttcttaggtttgctaaatactgtagggaaaaaatgcttctttctaactttgtttattttagactttaaaatgagctacttcttattcacttttgtaaacagctaatagcatggttccaattttttttaagttcactttttttgttctaggggaaatgaatgtgcaaaaaaagaaaaagaactgttggttatttgtgttattctggatgtataaaaatcaatggaaaaaaataaactttcaaattgaaatgacggtataacacatctactgaaaaagcaacgggaaatgtggtcctatttaagccagcccccacctagggtctatttgtgtggcagttattgggtttggtcacaaaacatcctgaaaattcgtgcgtgggcttctttctccctggtacaaacgtatggaatgcttcttaaaggggaactgtcaagctggtgtcttcagccagatgacatgagagaatatcccagaaccctctctccaaggtgtttctagatagcacaggagagcaggcactgcactgtccacagtccacggtacacagtcgggtgggccgcctcccctctcctgggagcattcgtcgtgcccagcctgagcagggcagctggactgctgctgttcaggagccaccagagccttcctctctttgtaccacagtttcttctgtaaatccagtgttacaatcagtgtgaatggcaaataaacagtttgacaagtacata

SEQ ID NO: 200 - DNA, 2985 bp, Homo sapiens
tcgtaaggttcataggtaagagaacagcgaaggttccggggctagtttgtgtttcagacttccatatttccatttgcagttgggtgaagtggttagagctgaaaggggacagctggagtcaaacaacttaactcaaatatctgggaacgatttcgcgctgaggaagaccctttgggacttgtagctccactccggggaacggactcgccgggactgacagttgccggaagtgaggctgcggggaatggccgccgctgcgaccatggcggctgcggcccgggaactggtgttgcgggctgggacctcagatatggaggaggaagagggcccgctggcgggtggtcctgggctccaggaaccactgcaacttggggagttggatatcacttctgatgaattcatcctggatgaagtggatgttcacattcaggcaaatctggaggatgagttagtaaaggaagctcttaaaacgggtgtagatctccgtcactattcaaagcaagttgagctggagctacagcagattgaacagaaatccattcgggattatattcaagagagtgagaatatagcatctctacacaaccagatcacagcctgtgatgctgtcctggagcgaatggagcagatgttgggagcttttcagagtgacctcagctccatcagctctgagatccggacactgcaggaacagtcaggagccatgaacattcgacttcgaaatcgccaggcagttcgggggaaacttggggagcttgttgatggtctggtggtgccttctgctctggtcacggcaattctggaggctccagtgacagagcccaggttcttggagcagctacaggagctggatgccaaggcagccgcagtcagagagcaggaagctagaggcacagcagcctgcgcagatgtcagaggcgtgctcgatcggctccgggtcaaggcagtgacgaagatccgagagtttatcctccagaagatttattccttcaggaaacccatgaccaactatcagatcccccagacggccctgctgaagtacaggttcttctatcagtttctgctgggcaatgaacgagcaacagcaaaggagatcagggatgaatatgtggagacgctgagcaagatttacctgtcttactaccgctcttacctggggcggctcatgaaggtgcagtatgaggaagtcgctgagaaagatgatctaatgggtgtggaagatacagcaaagaaaggattcttctcaaagccatcgctccgcagcaggaacaccattttcaccctaggaacccgcggctctgtcatctcccccactgaacttgaggcccccatcctggtgcctcacacagcgcagcgcggagagcagaggtatccatttgaggccctcttccgcagccagcactacgccctcctagacaattcctgccgcgaataccttttcatctgtgaattttttgttgtgtctggcccagctgcacacgacctgttccatgctgtcatgggccgtacactcagcatgaccctgaaacacctggattcttatctagctgactgctacgatgccattgctgtttttctctgtatccacattgttctccggttccgtaacattgcagcaaagagggatgttcctgccctggacaggtactgggaacaggtgcttgccttgctatggccacggtttgaactgatcctggagatgaatgttcagagcgtccgaagcactgacccccagcgcctaggggggttggatactcggccccactatatcacacgccgctatgcagagttctcctccgctcttgtcagtatcaaccagacaattcctaatgaacggaccatgcaattgctgggacagctgcaggtggaggtggagaattttgtcctccgagtggcagctgagttctcctcaaggaaggagcagcttgtgtttctgatcaacaactatgacatgatgctgggtgtgctgatggagcgggctgcagatgacagcaaagaggttgagagcttccagcagctgctcaatgctcggacacaggaattcattgaagagttgctgtctcccccttttgggggtttagtggcatttgtgaaggaggctgaggctttgattgagcgtggacaggctgagcgacttcgaggggaagaagcccgggtaactcagctgatccgtggctttggtagttcctggaaatcatcagtggaatctctgagtcaggatgtaatgcggagtttcaccaacttcagaaatggcaccagtatcattcagggagcgctgacccagctgatccagctctatcatcgcttccaccgggtgctgtcccagccgcagctccgagccctccctgcccgggctgagctcatcaacattcaccaccttatggtggagctcaagaagcataagcccaacttctgatgtgccagaaaccgccctgagatctgccggtcatctccatggacttctgcaccccattccatacccttcttcacctggggtaccccttccagttttccccttgcttcccaggcccttgacatggcttacctgccttcactcccagcaccttgcccaacaggataagctggatccccttggccttctgaatatcccagtgtcttcaggtttcccaagaccacttccctgtgggcttccaaaatggcctttatcatttctccagtctgtcaccctcctttcctgctcccatacacccaaggcttgtttcttcccctgtaaaaaccactgcctcaatctctggttcactcaactagtcaccatgtcctgaggcatgaagcctcctcagctcttggaattgctggcaaggggtgactgcctctgagtcattgtgtttttcaaagtgatttcttttctgtagctttttgacctaagatctcagcaatttgaacactaacctctcccctcctggctcaagaattactccgaagtcagtctgcagaaaataaatatttagtatgacatgacactta

SEQ ID NO: 201 - DNA, 1719 bp, Homo sapiens
gtctccgaggctcatggcgatgctggtcctagtacccggacgagttatgcggcctctgggtggccaactttggcgcttcttgcctcgcggactcgagttttggggcccagccgaggggactgcgagagtcttgctgaggcagttctgcgcgcggcaagcggaggcgtggcgtgcctcggggcgccctggctattgcctgggaacccggcccctcagcactgcgaggccgccacccccgtggtcgcagaagggccccggagactccacgcgcccctcgaagcccgggcctgtttcctggaagtctttagcaatcacatttgctattggaggagctttactggctggaatgaagcacgtcaagaaagaaaaggcagagaagttagagaaggaacggcagcgacacatcggcaagcctttacttgggggaccgttttccctcacaactcatactggggagcgtaaaactgacaaggactacttgggtcagtggttattgatttattttggcttcactcattgccctgatgtctgtccagaagaactagaaaagatgattcaagtcgtggatgaaatagatagcattacaactctgccagatctaactccacttttcatcagcattgacccagagagggacacaaaagaagccatcgcaaattatgtgaaagaattttctcccaaactggttggcttgactggcacgagagaagaggtcgatcaagtggccagagcatacagagtgtattacagccctggccccaaggacgaagatgaagactacatagtggatcacacaataataatgtacttgattggaccagatggtgagtttctagattattttggccagaacaagaggaagggagaaatagctgcttcaattgccacacacatgaggccatacagaaaaaagagctagccaaagcagtgttgctggatgcagtattctcttgctaagaggaaggaaactgtctcgcataggagcctatataaatataaacatatatacgtgcactctacagaatggccttcataccatgagaacatttctgttttggatggggatgttacccttgcgttcaaccaaaattgattcttggaactgtaaagattacaacccaaagtctcccaggaagctgtggggagaccagaggatcaagctgaagtgaagccagtgaagagcccacctgtggaaggacatggcggggcgaggcacagccagtgcattcctgcctgcgaacaggccctcccagcagctttgccgcctctccatcgtcttgggcccttgctcaaatagctgtgggactgaatttcacagaaaagaatataatttccatagtgctcttgcttgcctcttcttgagttctttgctcttctgagttcttggtggctaataacagtcagattagggtctctgccattcagagttgatgcttgaaaactttagttttccttattaatgaatatcactatcagatttgactaatgaagaggaaatctattgtttgggggaaaaaaaacatcagtttgatttctctaggggttcttttatgtgatttttagctaagtggtgtgccaggttttcagtgacataccaaatggaaataagaggatattgatcacgagtgtgatgctgagtacctttctgcatatactggattgtactttgtgtaaagtaaacatactcagttttgctgttcaaaaaaaaaaaaaaaaaaa

SEQ ID NO: 202 - DNA, 8056 bp, Homo sapiens
ctgctctccctgagcccgctcccgagcgctgctttcccgccgcgggtgggcttcgcagcctcaggccagccgcggcccttggcccgctgcagccccggccctccaccttccccgtgcaggggcggcccggccagtgtcgctcatcccgggacgctcccttctcccacccaggactgccccgcggagctggcttggacacccaactttgccacctcgagggtcgtctctgctgggcgcgaacctgcccacccaccggttggccgcgcgctcggggaccgtgctcgtggcccccaagccggtgcccccattctggaactcagcgagtagggggcggctctggggaagtggcagggggcggctgcagctgctgcctccacttccctagccaggtgctgaagaggatcctcggagccgctctggcccccaggcgctggatgactggcaccagcgctcctcgcacctgtgttggtgtgtgagacttgggctggagtgcccacgtggctgtggagtcagtgtgattcatgattgaggaaacgcgtcctccatcctctctctccttggcactttccacacatgaggagaagaagagcttctgtttagaagacacgtgcccagagtcagaggccccttgcccaccatgaagggaacctgtgttatagcatggctgttctcaagcctggggctgtggagactcgcccacccagaggcccagggtacgactcagtgccagagaaccgagcatccagtcatctcctataaagaaattggcccctggttacgggagttcagagcgaagaatgctgcggatttctcgcagttaacatttgacccaggacagaaagaacttgttgtaggagcaagaaactacctcttcaggttacagcttgaggatctgtctcttatccaggctgtggaatgggagtgtgatgaagctaccaaaaaggcctgttacagcaaaggcaaatcaaaggaggaatgtcagaactacatccgggtgcttctggtgggtggcgaccggttattcacctgtgggaccaatgcattcacgcctgtctgcaccaaccgctcgttgagcaacctggctgagatccatgatcagatcagtggcatggcccgctgtccctacagtccccagcacaattccacagcgctcctcacagctggtggggagctctatgctgctacagccatggattttccaggacgtgatcctgccatttaccgaagcctaggcattttacctcctctccgcacggcgcagtacaactccaaatggctcaatgagccaaactttgtgtcatcttatgacatcggaaattttacctacttctttttccgagaaaatgcagtagagcatgactgtgggaaaacagtgttctccagagctgcccgggtgtgcaagaacgatattggtgggcgcttcctgctggaagacacctggaccacattcatgaaggctcgcctgaactgctcccgtcctggggaagtccccttttactacaacgaattgcagagtactttcttcctgcctgagctggatttgatctatggcatctttaccaccaatgtgaacagcattgcggcctcagctgtgtgcgtcttcaacctgagcgccatcgcgcaggccttctctgggcccttcaagtaccaagaaaactcgcgctcggcctggctaccgtatcccaacccaaacccccacttccagtgtggcaccgtggaccagggcctgtacgtgaacctgaccgagagaaatctgcaggatgctcagaagttcattctggtgcatgaggtggtacagccagtgaccacagtgccctccttcatggaggacaatagccgcttttcccacgtggcagtcgacgtggtgcagggcagagaagcgctcgtccacatcatctatttggccacagattacggaaccattaagaaagtgcgggtacccctgaatcagacctcaagcagctgtttgctggaagagattgagctcttccctgagaggcggagggagcccatcaggagcctgcagatcctgcacagccagagtgtcctgttcgtggggctgcgggagcacgtggtcaagatccccctgaagaggtgccagttctaccgcacacgcagcacctgcattggggcccaggacccttactgtggctgggatgtggtaatgaagaaatgcacaagcctggaggagagcctgagcatgacgcagtgggaacagagcatctctgcgtgtccgaccaggaatctcaccgtggatgggcactttggtgtgtggtctccgtggacgccttgcacgcacacagatggcagcgccgtgggatcctgcctctgtcgaacccgctcctgcgacagcccggccccgcagtgtggtggctggcagtgcgagggccctggcatggagatcgccaactgttccaggaacggaggctggactccctggacctcgtggtctccctgcagcactacctgtgggatcggcttccaggtgcggcagcgctcctgcagcaaccccactcccaggcacgggggccgggtgtgcgtgggacagaaccgcgaggaaagatactgcaatgaacatttgctatgtcccccacacatgttctggacaggctggggtccttgggaacggtgcacagcccaatgcgggggtggcattcaagctcgccgcaggatctgtgagaatgggcctgactgtgcaggctgcaatgtggagtaccagtcttgcaacaccaacccgtgtcctgagctgaagaagaccacgccctggacaccctggacacctgtcaacatctctgacaacggcgaccactatgagcaacgattccgatacacatgcaaagcccgcctggctgatccgaatttgctggaagtgggaagacagagaatcgaaatgcggtactgttctagcgacggcaccagtggctgctccacagatgggctttctggggatttcctgcgtgctgggagatactctgcccacacggtcaacggggcttggtcagcctggacgtcgtggtcacagtgcagccgtgactgcagcaggggcattcggaaccggaagcgtgtttgcaacaaccccgaacccaagtatgggggaatgccttgccttggcccatctctggaataccaggaatgcaacactttgccctgcccagtggatggcgtgtggtcttgctggtccccctggacaaaatgttcagcaacatgcggcggtggacactatatgaggacccgctcttgctccaatccagccccggcctatggaggggacatctgcctggggctgcacacagaagaggcactctgcaacacgcagccctgcccagagagctggtcggagtggtcggactggtctgagtgtgaagcctctggcgtccaagtccgcgcccgccagtgcatcctcctgttccccatgggcagccagtgctccgggaacaccacggagagccggccgtgtgtgtttgactctaatttcatcccagaagtatctgtggcaagatccagtagcgtagaagagaaaaggtgtggagagttcaacatgttccacatgatcgccgtggggctgagcagctccatcctcggctgcctcctcaccctgctcgtctatacttactgccagcggtaccagcagcaatcccacgatgcgactgtcatccaccccgtctcacctgccccccttaataccagcataaccaaccacatcaacaaactggacaagtacgactcggtggaggccatcaaggcatttaacaaaaacaacttgatcctagaggaaagaaacaaatacttcaacccacatctcactgggaagacctattctaatgcctactttacagatctcaataattatgatgagtactaacagctttcatgttttgggcttcttgtaaatccccagttcctcaaggcctgtgccccatgactgcccatgtttctgaggcttcagagtcgaagtttggatacatttcaagtgcatttcaagccaccagagtgtcccattggtgccaaaaatacacgtctttaaaagcaacaaaaattgaaataagacatcgtgaaaatcttgaccattgttgattgagccagggtggtgaagtttttaattggtgttcatcctatttttctgacaagtccattggtttgttttttgagcattattttataaatgtgccacccacattggaaggagtctttctttagaactttggagtgtaaatcttcatgatgttgtaaattcaagaaaataggcactttctctgaaagacctgctccttccacaagaagtgcataggtccataatatttcataaaatgaagaaaaagaatgtggccaaacaattattcaccatggattgcccaactttccaaatctggataaagctgtgggattcttggaagcagcttgagtgttttcatcttgcctgggaagcccaggaattccacctggtccacaccggcagaagttacagtagactgtgaggcaccccaccttgctcctgatgcagtttctgtgccattgctggtgctggtggaggcagcggagcagaggctcaggcacaatgaagcgtggatgtgttctgcaggttgctgcaaaactcaccttattctgacttttggatttcatggcattccaggaagctccttgccatgctgttggcctggaagtccacctgtctggtccatagtgacgtcctgaagagccagtctgtaaaataaccaaccacttacttagcgtttggatagactccatgccttctctctccctgcaaagaaaaatcttgaacatttatgatgtcaattagtgaaagtattgaaaatactaaattataactaaaagcaactttttatgttattgaaaatattgaaagaactgatattaatgataatcattttatttttcatctctctgatatacccaatgtgtggcaatcagcccctaccatgagcattaatgccatgtaaagctggctttctggagtctgccaggtccacacgaagtgctacccccagtttctgctgttacttgctgcctccaggccaggggagcaggagatgctcagctctggtgccttttcttttatttcagtgctgccttcccacccacccagtccattcaccctcacctctccctgcatggaggcaacagcatttccaagatgtaccttgggaagtcaggatagctggaagtaagggtttttggggatccctgtggtctcttcactgatcatcgataagcatttaagagtgtgctaacaccattcacagaggtccctggaaaaaaatatataattttctcacaaacaaccaatacataacctatggcagttggttgaataattattgaaaaaaagaacacgactgaaaaagttcatctgatgcctctgagcatgtgataaagtcctgggtagacatggaaacgtgttcttacaaatgaaccttcggatctatgaaagaaaatatagtagggggactaaggaacatagaattttattagcatatgtgattttacccttatctttgtttctaatttaaagaaacaatttcagaaagtgttagaagaattctatgtttaataatgaatattgttgagttcaaaatattctcatatacccagatttacagagatgacacagtattgaaatggcaggtgggctctgtaagttatttggggattaatgaaatccagggtcttggcaggggggactcaatgtggccctctcactcatccctcatatgtcaagagtccttcctgtcttatatgcacatgctccaaggtccatactcagtagggggaaatctagccggatggttccccaattgttcctcggctggattttcatcatcagaaatttccaactcatctcatcagttttcttgtaagaaaaaaacatttttcactttgtagcacaattttagttatttttgagtcttcttccctaatagtttgtaagcttaaagggacaattttaattttcccctggttaaagagggattctaatatttccaagaatgttttccactggaattgatgggaaatggtttctaaatggcatcgaagctggtctttaatgatcttttgcaatgacttgggaaaaacaccctccctcactacaggatcttcatgttgttaataatataaacaaacctttgaaattagcattgcaaaagaatcccatttttgtttcgtaccacactgttcaaaggaaaattgtttatctctcttcctttctctctctctcttatttgacagaatagcaagtgtttagataatttcagatatattcctaagtattttaccagctgtggaataagttgtgtttgtccatcactgtgtagctaccgttcacatgttctggctctgtactccacgcttatcgcgtgaaccctcacatgttggactttcacagtgtgatctctcacctgtcttggaaactccttcataaagccgctcttccttaggcctgggctgtttggaagtcctggtgaaactttgcggttcacattttaaattcctgaatgaccttttcattctctctttctttatctttgtttttgtccttcattccctccttttgttcttccttcctgcctttcacgtcacctacttatccgactatttcctccatttgcttcttttctatttgccatcacctgtgacccgagtggaacaaaaaccaacacatagttttaagctacacctttctgcacctgatgtaaaatgacattaatccactatttaacttctaaaattatttctgaatacagttgcagataggctggttttcatgaggaagctcgcttggctttagtcttacatttaaattctttgaaagtggctcccagtgctattcagggtcctttcttgaggccagactcatcaccatctactattgattttacagtgcactgacagtttacaggaaggagaagaacagaatttctgcacactacacaacatgtgggcttcctgtagctccagggacatgtagctttggtgaaactggggttttgtaacctctgaatgatatggacttagtgaattctaaggaactcagggggcacgtggtcaggctccaccgcacagaagagccacagtctccagactcatggcgttccctccagaactccccattcccctctgagcatatttctatgctgctgcttcttgtgacttacatgaggcatctcagcttcttcatgtttgtagggatggttccctaagcctgttcaagtaggctctcactagagttaccattcatatttgagaagaaaagaacatttattaaatgtatgtgtggggctgaggttctaaaggaattgaaaagagacgataaacattgaatgagggtgagggcatccctgctggggagaaacctctgtcccctaggaagagtccgttcatgtcatgtggtttgggatgaaccaggggtctgcccccatcgggtcacaggtgatgccaaatagaaaagaagcaaatggaggaaatagtcggataagtaggtgacgtgaaaggcaggacctggtcaccccagcaagtgctatggacagttcccggaaacggttgcccacttcacaggtccatgggtctgacccttggactctgccaggatcaactgcccagagtgccagagttttagccaaaggtgtacttacttccttatttatctccaaaaggatggaaactgtgggagtcaaagcctattttgctgagtgttcccactggatcctctgtagaattagcaggtcatgctgtcaaaatcatggacaaaggctgggtgcagtggctcatgcctataatcccagcactttgggaggccaaggtgggcggatcacctgagctcaggagtttaagaccagcctgggcaacatggggaaactccatctctacaaaatatacaaaatattagccagccatcgtggtgcgtgcctgtggtcccagtttcttgggaggctgaggcgggagtatcatttgagccaggaggttgaggttgcagtgagctgagatcacatcactgcactccatcctgggtgacagagagagaccctgtctcaaaaaaaaa

SEQ ID NO: 203 - DNA, 1246 bp, Homo sapiens
gaaaaacagctcgcgctgcacaaagatagacggggagctcccccaggctcctctgtgctttactaagatggcctcagtctccactgtgggcttgagtggcatacactgttattcatggttaaggtaaagcaggtcaagggatggcattgaaaaaatatatttagtttttaaaatatttgggatggaactccctactgacctctgagaactggaaacgagtttgtacagaagtcagaactttgggttgggaatgagatctaggttgtggctgctggtatgcttcagcttgctggcaatgatgtgccttgacaaccgtgggccaggcctgggcccagggactcttcctgtttcataaggaaaggaagaattgcactgagcattccacttaggaagaggatagagaaggatctgctccgcctttggccacaggagcagaggcagacctgggatgccccagtttctcttcagggatggatagtgacctgtcttcattttgcacaggtaagagagtagttagctaacctatgggaattatactgtggggccttgtgagctgcttctaagaggctaacctggaaactaagctcagaggcaaggtaataaagcacttcagggcttgctccccaagtgggcctgatttagcaggtggtcctgcgggcgtccaggtcagcaccttcctgtagggcactggggctagggtcacagcccctaactcataaagcaatcaaagaaccattagaaagggctcattaagccttttggacacaggaccccagagaggaaaaagtgacttgcccaaggtcgtaagcaagctactggcatggcaagagcccagcttcctgacggagcgcaacatttctccactgcactgtgctagcagctcagcagggcctctaacctgtgatgtcacactcaagaggccttggcagctcctagccatagagcttcctttccagaacccttccactgcccaatgtggagacaggggttagtggggctttctatggagccatctgctttggggacctagacctcaggtggtctcttggtgttagtgatgctggagaagagaatattactggtttctacttttctataaaggcatttctctatatacatgttttatatacctcattctgacacctgcatatagtgtgggaaattgctctgcatttgacttaattaaaaaaaaaaaaaaagacaaaaaaaaaaaaaaaaaaaaaaaaaaaaaaaaaaaaaaaaaaaa

SEQ ID NO: 204 - DNA, 2222 bp, Homo sapiens
  misc_feature (2183)..(2183): n is a, c, g, or t
  misc_feature (2199)..(2199): n is a, c, g, or t
  misc_feature (2209)..(2209): n is a, c, g, or t
cggggagacgggacgtgaagggatgcgggctccgggtgcgggcgcggcctcggtggtctcgctggcgctgttgtggctgctggggctgccgtggacctggagcgcggcagcggcgctcggcgtgtacgtgggcagcggcggctggcgcttcctgcgcatcgtctgcaagaccgcgaggcgagacctcttcggtctctctgtgctgatccgcgtgcgcctggagctgcggcggcaccagcgtgccggccacaccatcccgcgcatctttcaggcggtagtgcagcgacagcccgagcgcctggcgctggtggatgccgggaccggcgagtgctggacctttgcgcagctggacgcctactccaatgcggtagccaacctcttccgccagctgggcttcgcgccgggcgacgtggtggccatcttcctggagggccggccggagttcgtggggctgtggctgggcctggccaaggcgggcatggaggccgcgctgctcaacgtgaacctgcggcgcgagcccctggccttctgcctgggcacctcgggcgctaaggccctgatctttggaggagaaatggtggcggcggtggccgaagtgagcgggcatctggggaaaagtttgatcaagttctgctctggagacttggggcccgagggcatcttgccggacacccacctcctggacccgctgctgaaggaggcctctactgcccccttggcacagatccccagcaagggcatggacgatcgtcttttctacatctacacgtcggggaccaccgggctgcccaaggctgccattgtcgtgcacagcaggtactaccgcatggcagccttcggccaccacgcctaccgcatgcaggcggctgacgtgctctatgactgcctgcccctgtaccactcggcaggaaacatcatcggcgtggggcagtgtctcatctatgggctgacagtcgtcctccgcaagaaattctcggccagccgcttctgggacgactgtatcaagtacaactgcacggtggttcagtacatcggggagatctgccgctacctgctgaagcagccggtgcgcgaggcggagaggcgacaccgcgtgcgcctggcggtggggaacgggctgcgtcctgccatctgggaggagttcacggagcgcttcggcgtacgccaaatcggggagttctacggcgccaccgagtgcaactgcagcattgccaacatggacggcaaggtcggctcctgtggtttcaacagccgcatcctgccccacgtgtaccccatccggctggtgaaggtcaatgaggacacaatggagctgctgcgggatgcccagggcctctgcatcccctgccaggccggggagcctggcctccttgtgggtcagatcaaccaacaggacccgctgcgccgcttcgatggctatgtcagcgagagcgccaccagcaagaagatcgcccacagcgtcttcagcaagggcgacagcgcctacctctcaggtgacgtgctagtgatggatgagctgggctacatgtacttccgggaccgtagcggggacaccttccgctggcgaggggagaacgtctccaacaccgaggtggagggcgtgctgagccgcctgctgggccagacagacgtggccgtctatggggtggctgttccaggagtggagggtaaggcagggatggcggccgtcgcagacccccacagcctgctggaccccaacgcgatataccaggagctgcagaaggtgctggcaccctatgcccggcccatcttcctgcgcctcctgccccaggtggacaccacaggcaccttcaagatccagaagacgaggctgcagcgagagggctttgacccacgccagacctcagaccggctcttcttcctggacctgaagcagggccactacctgcccttaaatgaggcagtctacactcgcatctgctcgggcgccttcgccctctgaagctgttcctctactggccacaaactctgggcgtggtgggagaggccagcttgagccagacagcgctgcccaggggtggccgcctagtacacacccacctggccgagctgtacctggcacggcccatcctggactgagaaactggaacctcagaggaacccgtgcctctctgctgccttggtgcccctgtgtctgcctcctctccctgcttttcagcctntgtctccttccatccntgtccctgtntggccttaacccg

SEQ ID NO: 205 - DNA, 1730 bp, Homo sapiens
gcatttctgccatcgcccaccgtggcggcacaagcggcagcccgagaacacgctggcggccattcggcagctaagaatggagcaacaggcgtggagttggacattgagtttacttcggacgggattcctgtcttaatgcacgataacacagtagataggacgactgatgggactgggcgattgtgtgatttgacatttgaacaaattaggaagctgaatcctgcagcaaaccacagactcaggaatgatttccctgatgaaaagatccctaccctaagggaagctgttgcagagtgcctaaaccataacctcacaatcttctttgatgtcaaaggccatgcacacaaggctactgaggctctaaagaaaatgtatatggaatttcctcaactgtataataatagtgtggtctgttctttcttgccagaagttatctacaagatgagacaaacagatcgggatgtaataacagcattaactcacagaccttggagcctaagccatacaggagatgggaaaccacgctatgatactttctggaaacattttatatttgttatgatggacattttgctcgattggagcatgcataatatcttgtggtacctgtgtggaatttcagctttcctcatgcaaaaggattttgtatccccggcctacttgaagaagtggtcagctaaaggaatccaggttgttggttggactgttaatacctttgatgaaaagagttactacgaatcccatcttggttccagctatatcactgacagcatggtagaagactgcgaacctcacttctagactttcacggtgggacgaaacgggttcagaaactgccaggggcctcatacagggatatcaaaataccctttgtgctagcccaggccctggggaatcaggtgactcacacaaatgcaatagttggtcactgcatttttacctgaaccaaagctaaacccggtgttgccaccatgcaccatggcatgccagagttcaacactgttgctcttgaaaatctgggtctgaaaaaacgcacaagagcccctgccctgccctagctgaggcacacagggagacccagtgaggataagcacagattgaattgtacaatttgcagatgcagatgtaaatgcatgggacatgcatgataactcagagttgacattttaaaacttgccacacttatttcaaatatttgtactcagctatgttaacatgtactgtagacatcaaacttgtggccatactaataaaattattaaaaggagcactaaaggaaaactgtgtgccaagcatcatatcctaaggcatacggaatttggggaagccaccatgcaatccagtgaggcttcagtgtacagcaaccaaaatggtagggaggtcttgaagccaatgagggatttatagcatcttgaatagagagctgcaaaccaccagggggcagagttgcacttttccaggctttttaggaagctctgcaacagatgtgatctgatcataggcaattagaactggaagaaacttccaaaaagatctaggggtatgctcatggtgcaaagtgggggaactaaactcttaggggagaagagggggtgacccgcaaaagagacgagattagagggaacgagagggggaagccggagagtccaggaaataaggaggtgaagaaagaaggttgtttaaggcgagctggggaagttggaagcccgaaacttgaaaggaggataaaa

SEQ ID NO: 206 - DNA, 890 bp, Homo sapiens
ggcggcggggagggggggggcggatgcggggacagcggcctggctaactcctgccaggcagtgcccttcccggagcgtgccctcgccgctgagctcccctgaacagcagctgcagcagccatggccccgccctgggtgcccgccatgggcttcacgctggcgcccagcctggggtgcttcgtgggctcccgctttgtccacggcgagggtctccgctggtacgccggcctgcagaagccctcgtggcacccgccccactgggtgctgggccctgtctggggcacgctctactcagccatggggtacggctcctacctggtctggaaagagctgggaggcttcacagagaaggctgtggttcccctgggcctctacactgggcagctggccctgaactgggcatggccccccatcttctttggtgcccgacaaatgggctgggccttggtggatctcctgctggtcagtggggcggcggcagcactaccgtggcctggtaccaggtgagcccgctggccgcccgcctgctctacccctacctggcctggctggccttcgcgaccacactcaactactgcgtatggcgggacaaccatggctggcgtgggggacggcggctgccagagtgagtgcccggcccaccagggactgcagctgcaccagcaggtgccatcacgcttgtgatgtggtggccgtcacgctttcatgaccactgggcctgctagtctgtcagggccttggcccaggggtcagcagagcttcagaggtggccccacctgagcccccacccgggagcagtgtcctgtgctttctgcatgcttagagcatgttcttggaacatggaattttataagctgaataaagtttttgacttcctttaaaaaaaaaaa

SEQ ID NO: 207 - DNA, 968 bp, Homo sapiens
cccaccctccctaatttccactccccccaccccacttcgcctgccgcggtcgggtccgcggcctgcgctgtagcggtcgccgccgttccctggaagtagcaacttccctaccccaccccagtcctggtccccgtccagccgctgacgtgaagatgagcagctcagaggaggtgtcctggatttcctggttctgtgggctccgtggcaatgaattcttctgtgaagtggatgaagactacatccaggacaaatttaatcttactggactcaatgagcaggtccctcactatcgacaagctctagacatgatcttggacctggagcctgatgaagaactggaagacaaccccaaccagagtgacctgattgagcaggcagccgagatgctttatggattgatccacgcccgctacatccttaccaaccgtggcatcgcccagatgttggaaaagtaccagcaaggagactttggttactgtcctcgtgtgtactgtgagaaccagccaatgcttcccattggcctttcagacatcccaggtgaagccatggtgaagctctactgccccaagtgcatggatgtgtacacacccaagtcatcaagacaccatcacacggatggcgcctacttcggcactggtttccctcacatgctcttcatggtgcatcccgagtaccggcccaagagacctgccaaccagtttgtgcccaggctctacggtttcaagatccatccgatggcctaccagctgcagctccaagccgccagcaacttcaagagcccagtcaagacgattcgctgattccctcccccacctgtcctgcagtctttgacttttcctttcttttttgccaccctttcaggaaccctgtatggtttttagtttaaattaaaggagtcgttatcgtggtgggaatatgaaataaagtagaagaaaaggccaagaaaaaaaaaaaaaaaaaaaaaaaaa

SEQ ID NO: 208 - DNA, 881 bp, Homo sapiens
ttttttttttttttttttttttttttaagttccttagaatattatttttcctactgaaagttaccacatgcgtcgttgtttatacagtaataggaacaagaaaaaagtcacctaagctcaccctcatcaattgtggagttcctttatatcccatcttctctccaaacacatacgcagcagtgttacagctcttttagaatttgtctagtaggctttctggctttttaccggaaagcccctcttatgatgtttgttgccaatgatagattgttttcactgtgcaaaaattatgggtagttttggtggtcttgatgcagttgtaagcttggggtatgaaggtttgggccacgcctgggcgcttccggctgcgccggatgctgtttcctttccgctcccaggggcgttgggaacggttgtaggacgtggctctttattcgtgagttttccatttacctccgctgaacctagagcttcagacgccctatggcgtccgcctcgacccaaccggcggccttgagcgctgagcaagcaaaggtggtcctcgcggaggtgatccaggcgttctccgccccggagaatgcagtgcgcatggacgaggctcgggataacgcctgcaacgacatgggtgtccttaagtttgctcgcttggtcaagtcctacgaagcccaggatcctgagatcgccagcctgtcaggcaagctgaaggcgctgtttctgccgcccatgaccctgccaccccatgggcctgctgctggtggcagcgtggccgcctcctgagagttggccctcccttgtgccactgccaggggaggaaaggccttgatgttccagacaataataaatgcgcctgtgactttaaaaaaaaaaaaaaaaaaaaaaca

SEQ ID NO: 209 - DNA, 2851 bp, Homo sapiens
cgccccgcgccggccccgcgctgtcagctccctcagcgtccggccgaggcgcggtgtatgctgagccgctgccgcagccggctgctccacgtcctgggccttagcttcctgctgcagacccgccggccgattctcctctgctctccacgtctcatgaagccgctggtcgtgttcgtcctcggcggccccggcgccggcaaggggacccagtgcgcccgcatcgtcgagaaatatggctacacacacctttctgcaggagagctgcttcgtgatgaaaggaagaacccagattcacagtatggtgaacttattgaaaagtacattaaagaaggaaagattgtaccagttgagataaccatcagtttattaaagagggaaatggatcagacaatggctgccaatgctcagaagaataaattcttgattgatgggtttccaagaaatcaagacaaccttcaaggatggaacaagaccatggatgggaaggcagatgtatctttcgttctcttttttgactgtaataatgagatttgtattgaacgatgtcttgagaggggaaagagtagtggtaggagtgatgacaacagagagagcttggaaaagagaattcagacctaccttcagtcaacaaagccaattattgacttatatgaagaaatggggaaagtcaagaaaatagatgcttctaaatctgttgatgaagtttttgatgaagttgtgcagatttttgacaaggaaggctaattctaaacctgaaagcatccttgaaatcatgcttgaatattgctttgatagctgctatcatgacccctttttaaggcaattctaatctttcataactacatctcaattagtggctggaaagtacatggtaaaacaaagtaaatttttttatgttcttttttttggtcacaggagtagacagtgaattcaggtttaacttcaccttagttatggtgctcaccaaacgaagggtatcagctatttttttttaaattcaaaaagaatatcccttttatagtttgtgccttctgtgagcaaaactttttagtacgcgtatatatccctctagtaatcacaacattttaggatttagggatacccgcttcctctttttcttgcaagttttaaatttccaaccttaagtgaatttgtggaccaaatttcaaaggaactttttgtgtagtcagttcttgcacaatgtgtttggtaaacaaactcaaaatggattcttaggagcattttagtgtttattaaataactgaccatttgctgtagaaagatgagaaaacttaagctttgttttactacaacttgtacaaagttgtatgacagggcatattctttgcttccaagatttgggttgggggcactaggggttcagagcctggcagaattgtcagctttagtctgacataatctaagggtatggggcaaggatcacatctaatgcttgtgttccttatactctattatatagtgttattcatgattcagctgatcttaacaaaattcgtagcagtggaaccttgaaatgcatgtggctagatttatgctaaaatgattctcagttagcattttagtaacacttcaaaggtttttttttgtttgttttctagacttaataaaagcttaggattaattagaagaagcaatctagttaaatttcccatttgtattttattttcttgaatacttttttcatagttatttgtttaaaaagatttaaaaatcattgcactttggtcagaaaaataataaatatatcttataaatgtttgattcccttccttgctatttttattcagtagatttttgtttggcatcatgttgaagcaccgaaagataaatgatttttaaaaggctatagagtccaaaggaatattcttttacaccaattcttcctttaaaaatctctgaggaatttgttttcgccttacttttttttcttctgtcacaatgctaagtggtatccgaggttcttaatatgagatttaaaatcttaaaatgtttcttattttcagcacttacatcatttggtacacagggtcaaatagggcaaataattttgtctttgtataatagatttgatatttaaagtcactggaaataggacaagttaatggatgtttttatattttaatagaatcatttatttctatgtgttatgaaattcacttaatgataaatttttcaacatacttgccattagaaaacaaagtattgctaagtactataacatattggccactaaaattcatattgagattatcttggtttcttggaagagataggaatgagttcttatctagtgttgcaggccagcaaatacagaggtggtttaatcaaacagctctagtatgaagcaagagtaaagactaaggtttcgagagcattcctactcacataagtgaagaaatctgtcagataggaatctaaatatttatagtgagattgtgaaagcaaccttaaagttttgaagaagactgatgagactaggtgctttgcttcctttcatcaggtatctttctgtggcatttgagaacagaaaccaagaaacatggtaattactaaattatgaggctttgctttttgtttgcttttaagtagaaaaacatgttggcaacattgagttttggagttgattgagataatatgacttaactagttttgtcattccatttgttaaagatacagtcaccaagaatgttttgagttttttgaaagaccccaatttaagccttgcttatttttaaattatttccattcagtgatgttggatgtatatcaattatttagtaaataatctcaataaattttgtgctgtggcctttgctaaaaaaaaaaaaat

SEQ ID NO: 210 - DNA, 2342 bp, Homo sapiens
cctcggaccaccggactggcctggggcgggacgtgggcgcgggggcgcggcgtgcggcacgctgcagggctgaagcggcggcggcggtggggactgcacgtagcccggcgctcggcatggctctcctggtgctcggtctggtgagctgtaccttctttctggcagtgaatggtctgtattcctctagtgatgatgtgatcgaattaactccatcaaatttcaaccgagaagttattcagagtgatagtttgtggcttgtagaattctatgctccatggtgtggtcactgtcaaagattaacaccagaatggaagaaagcagcaactgcattaaaagatgttgtcaaagttggtgcagttgatgcagataagcatcattccctaggaggtcagtatggtgttcagggatttcctaccattaagatttttggatccaacaaaaacagaccagaagattaccaaggtggcagaactggtgaagccattgtagatgctgcgctgagtgctctgcgccagctcgtgaaggatcgcctcgggggacgaagcggaggatacagttctggaaaacaaggcagaagtgatagttcaagtaagaaggatgtgattgagctgacagacgacagctttgataagaatgttctggacagtgaagatgtttggatggttgagttctatgctccttggtgtggacactgcaaaaacctagagccagagtgggctgccgcagcttcagaagtaaaagagcagacgaaaggaaaagtgaaactggcagctgtggatgctacagtcaatcaggttctggcctcccgatacgggattagaggatttcctacaatcaagatatttcagaaaggcgagtctcctgtggattatgacggtgggcggacaagatccgacatcgtgtcccgggcccttgatttgttttctgataacgccccacctcctgagctgcttgagattatcaacgaggacattgccaagaggacgtgtgaggagcaccagctctgtgttgtggctgtgctgccccatatccttgatactggagctgcaggcagaaattcttatctggaagttcttctgaagttggcagacaaatacaaaaagaaaatgtgggggtggctgtggacagaagctggagcccagtctgaacttgagaccgcgttggggattggagggtttgggtaccccgccatggccgccatcaatgcacgcaagatgaaatttgctctgctaaaaggctccttcagtgagcaaggcatcaacgagtttctcagggagctctcttttgggcgtggctccacggcacctgtaggaggcggggctttccctaccatcgttgagagagagccttgggacggcagggatggcgagcttcccgtggaggatgacattgacctcagtgatgtggagcttgatgacttagggaaagatgagttgtgagagccacaacagaggcttcagaccattttcttttcttgggagccagtggatttttccagcagtgaagggacattctctacactcagatgactctaccagtggccttttaaccaagaagtagtacttgattggtcatttgaaaacactgcaacagtgaacttttgcatctcaagaaaacattgaaaaattctatgaattgttgtagccggtgaattgagtcgtattctgtcacataatattttgaagaaaacttggctgtcgaaacatttttctctctgactgctgcttgaatgttcttggaggctgtttcttatgtatgggttttttttaatgtgatcccttcatttgaatattaatggctttttccattaaagaataaaatattttggacaatgccgataaatgtatgaagttagtatccacatcataaattcagagtgatgtttagcagtaaatcaatattttgaagtgatacacagatgtctttcctccccacaaacttttttaaacaaaaaacaagacctcttttctttagatggtgccacctatgcccaccacaacagagattttacatggaaaccgggctcagtgagaactgatttcctgcccaatatttgtctttgggctgtctctagtgactaattattaaggaatctagctggttatacagttcaaggctttctatgttgttaatgaacctcaaaatagccgttaagacatgaaatacagcagcaggttaccaatgcgaacaggtagttcgcatttatgtaaaacattcagaaaatgaagttttgaatttgttggaacattcaaaggacttgagagcattttattgtaacttaaaaaaataaatacaactgtcactaaaaaaaaaaaaaaaaaaaaaaaaaaaaaaaaaaaaaa

SEQ ID NO: 211 - DNA, 989 bp, Homo sapiens
cgcgcgggcgtcgtgcacgcggttgtagctgcccggcggcggcagaagcggcgctcgcgccaagggacgtgtttctgcgctcgcgtggtcatggaggcgctgccgctgctagccgcgacaactccggaccacggccgccaccgaaggctgcttctgctgccgctactgctgttcctgctgccggctggagctgtgcagggctgggagacagaggagaggccccggactcgcgaagaggagtgccacttctacgcgggtggacaagtgtacccgggagaggcatcccgggtatcggtcgccgaccactccctgcacctaagcaaagcgaagatttccaagccagcgccctactgggaaggaacagctgtgatcgatggagaatttaaggagctgaagttaactgattatcgtgggaaatacttggttttcttcttctacccacttgatttcacatttgtgtgtccaactgaaattatcgcttttggcgacagacttgaagaattcagatctataaatactgaagtggtagcatgctctgttgattcacagtttacccatttggcctggattaatacccctcgaagacaaggaggacttgggccaataaggattccacttctttcagatttgacccatcagatctcaaaggactatggtgtatacctagaggactcaggccacactcttagaggtctcttcattattgatgacaaaggaatcctaagacaaattactctgaatgatcttcctgtgggtagatcagtggatgagacactacgtttggttcaagcattccagtacactgacaaacacggagaagtctgccctgctggctggaaacctggtagtgaaacaataatcccagatccagctggaaagctgaagtatttcgataaactgaattgagaaatacttcttcaagttatgatgcttgaaagttctcaataaagttcacggtttcattaccaaaaaaaaaaaaaaaaaaaaaa

SEQ ID NO: 212 - DNA, 3096 bp, Homo sapiens
gcgggtgacgcgacgacggctcgacactttgctacggagtgcatcggacgtcgaagcctagagtctctgcgtctttccctcttccgctgcctcattcctttccttcctagccttggtcgtcgccgccaccatgaacaagaagaagaaaccgttcctagggatgcccgcgcccctcggctacgtgccggggctgggccggggcgccactggcttcaccacgcggtcagacattgggcccgcccgtgatgcaaatgaccctgtggatgatcgccatgcacccccaggcaagagaaccgttggggaccagatgaagaaaaatcaggctgctgacgatgacgacgaggatctaaatgacaccaattacgatgagtttaatggctatgctgggagcctcttctcaagtggaccctacgagaaagatgatgaggaagcagatgctatctatgcagccctggataaaaggatggatgaaagaagaaaagaaagacgggagcaaagggagaaagaagaaatagagaaatatcgtatggaacgccccaaaatccaacagcagttctcagacctcaagaggaagttggcagaagtcacagaagaagagtggctgagcatccccgaggttggcgatgccagaaataaacgtcagcggaacccacgctatgagaagctgacccctgttcctgacagtttctttgccaaacatttacagaccggagagaaccatacctcagtggatccccgacaaactcaatttggaggtcttaacacaccctatccaggtggactaaacactccatacccaggtggaatgacgccaggactgatgacacctggcacagtgagctggacatgaggaagattggccaagcgaggaacactctgatggacatgaggctgagccaggtgtctgactccgtgagtggacagaccgtcgttgaccccaaaggctacctgacggatttaaattccatgatcccgacacacggaggagacatcaatgatatcaagaaggcgcgactgctcctcaagtctgttcgggagacgaaccctcatcacccgccagcctggattgcatcagcccgcctggaagaagtcactgggaagctacaagtagctcggaaccttatcatgaaggggacggagatgtgccccaagagtgaagatgtctggctggaagcagccaggttgcagcctggggacacagccaaggccgtggtagcccaagctgtccgtcatctcccacagtctgtcaggatttacatcagagccgcagagctggaaacggacattcgtgcaaagaagcgggttcttcggaaagccctcgagcatgttccaaactcggttcgcttgtggaaagcagccgttgagctggaagaacctgaagatgctagaatcatgctgagccgagctgtggagtgctgccccaccagcgtggagctctggcttgctctggcaaggctggagacctatgaaaatgcccgcaaggtcttgaacaaggcgcgggagaacattcctacagaccgacatatctggatcacggctgctaagctggaggaagccaatgggaacacgcagatggtggagaagatcatcgaccgagccatcacctcgctgcgggccaacggtgtggagatcaaccgtgagcagtggatccaggatgccgaggaatgtgacagggctgggagtgtggccacctgccaggccgtcatgcgtgccgtgattgggattgggattgaggaggaagatcggaagcatacctggatggaggatgctgacagttgtgtagcccacaatgccctggagtgtgcacgagccatctacgcctacgccctgcaggtgttccccagcaagaagagtgtgtggctgcgcgccgcgtacttcgagaagaaccatggcactcgggagtccctggaagcactcctgcagagggctgtggcccactgccccaaagcagaggtgctgtggctcatgggcgccaagtccaagtggctggcaggggatgtgcctgcagcaaggagcatcctggccctggccttccaggccaaccccaacagtgaggagatctggctggcagccgtgaagctggagtccgagaatgatgagtacgagcgggcccggaggctgctggccaaggcgcggacagtgcccccaccgcccgggtgttcatgaagtctgtgaagctggagtgggtgcaagacaacatcagggcagcccaagatctgtgcgaggaggccctgcggcactatgaggacttccccaagctgtggatgatgaaggggcagatcgaggagcagaaggagatgatggagaaggcgcgggaagcctataaccaggggttgaagaagtgtccccactccacacccctgtggcttttgctctctcggctggaggagaagattgggcagcttactcgagcacgggccattttggaaaagtctcgtctgaagaacccaaagaaccctgggctgtggttggagtccgtgcggctggagtaccgtgcggggctgaagaacatcgcaaatacactcatggccaaggcgctgcaggagtgccccaactccggtatcctgtggtctgaggccatcttcctcgaggcaaggccccagaggaggaccaagagcgtggatgccctgaagaagtgtgagcatgacccccatgtgctcctggccgtggccaagctgttttggagtcagcggaagatcaccaaggccagggagtggttccaccgcactgtgaagattgactcggacctgggggatgcctgggccttcttctacaagtttgagctgcagcatggcactgaggagcagcaggaggaggtgaggaagcgctgtgagagtgcagagcctcggcatggggagctgtggtgcgccgtgtccaaggacatcgccaactggcagaagaagatcggggacatccttaggctggtggccggccgcatcaagaacaccttctgattgagcggttgccatggccggtctccgtggggcagggttgggccgcatgtggaagggctctgagctgtgtcctccttcattaaaagtttttatgtctcgtgtcagaaaaaaaaagaaaagaaaaaagggggcgcccgggggc

SEQ ID NO: 213 - DNA, 1270 bp, Homo sapiens
tttttttctcgacaagatggccacaccggcggtaccagtaagtgctcctccggccacgccaaccccagtcccggcggcggccccagcctcagttccagcgccaacgccagcaccggctgcggctccggttcccgctgcggctccagcctcatcctcagaccctgcggcagcagcggctgcaactgcggctcctggccagaccccggcctcagcgcaagtccagcgcagaccccagcgcccgctctgcctggtcctgctcttccagggcccttccccggcggccgcgtggtcaggctgcacccagtcattttggcctccattgtggacagctacgagagacgcaacgagggtgctgcccgagttatcgggaccctgttgggaactgtcgacaaacactcagtggaggtcaccaattgcttttcagtgccgcacaatgagtcagaagatgaagtggctgttgacatggaatttgctaagaatatgtatgaactgcataaaaaagtttctccaaatgagctcatcctgggctggtacgctacgggccatgacatcacagagcactctgtgctgatccatgagtactacagccgagaggcccccaaccccatccacctcactgtggacacaagtctccagaacggccgcatgagcatcaaagcctacgtcagcactttaatgggagtccctgggaggaccatgggagtgatgttcacgcctctgacagtgaaatacgcgtactacgacactgaacgcatcggagttgacctgatcatgaagacctgctttagccccaacagagtgattggactctcaagtgacttgcagcaagtaggaggggcatcagctcgcatccaggatgccctgagtacagtgttgcaatatgcagaggatgtactgtctggaaaggtgtcagctgacaatactgtgggccgcttcctgatgagcctggttaaccaagtaccgaaaatagttcccgatgactttgagaccatgctcaacagcaacatcaatgaccttttgatggtgacctacctggccaacctcacacagtcacagattgcactcaatgaaaaacttgtaaacctgtgaatggaccccaagcagtacacttgctggtctaggtattaaccccaggactcagaagtgaaggagaaatgggttttttgtggtcttgagtcacactgagatagtcagttgtgtgtgactctaataaacggagcctaccttttgtaaatttaaaaaaaaaaaaaaaaaaaaaaaaaaagaacgg

SEQ ID NO: 214 - DNA, 869 bp, Homo sapiens
gccctggccgtggcgaaagagccggcggagccggagacccgctcccggagacgccgcctcgcgatccccgcgcgggcgggaccgggcggccggcatcatgaccctgtttcacttcgggaactgcttcgctcttgcctacttcccctacttcatcacctacaagtgcagcggcctgtccgagtacaacgccttctggaaatgcgtccaggctggagtcacctacctctttgtccaactctgcaagatgctgttcttggccactttctttcccacctgggaaggcggcatctatgacttcattggggagttcatgaaggccagcgtggatgtggcagacctgataggtctaaaccttgtcatgtcccggaatgccggcaagggagagtacaagatcatggttgctgccctgggctgggccactgctgagcttattatgtcccgctgcattcccctatgggtcggagcccggggcattgagtttgactggaagtacatccagatgagcatagactccaacatcagtctggtccattacatcgtcgcgtctgctcaggtctggatgataacacgctatgatctgtaccacaccttccggccagctgtcctcctgctgatgttcctcagtgtctacaaggcctttgttatggagaccttcgtccacctctgctcgctgggcagttgggcagctctactggcccgagcagtggtaacggggctgctggccctcagcactttggccctgtatgtcgccgttgtcaatgtgcactcctaggcttggtgtctcagacattgatgtaccttttccctgcctcgctccaggttttagtgaagtaaacagtatttggaaagttaaaaaaaaaaaaaaaaaa

SEQ ID NO: 215 - DNA, 1853 bp, Homo sapiens
atcgcgcgagacagcggaaggagcaagagtgggaggcgcgcgcggaggccgcgacggacgcaagatggcgacggcgaccatagctctccaggtcaatggccagcaaggaggggggtccgagccggcggcggcggcggcagtggtggcagcgggagacaaatggaaacctccacagggcacagactccatcaagatggagaacgggcagagcacagccgccaagctggggctgcctcccctgacgcccgagcagcaggaggcccttcagaaggccaagaagtacgccatggagcagagcatcaagagtgtgctggtgaagcagaccatcgcgcaccagcagcagcagctcaccaacctgcagatggcggctcagcggcagcgggcgctggccatcatgtgccgcgtctacgtgggctctatctactatgagctgggggaggacaccatccgccaggcctttgccccctttggccccatcaagagcatcgacatgtcctgggactccgtcaccatgaagcacaagggctttgccttcgtggagtatgaggtccccgaagctgcacagctggccttggagcagatgaactcggtgatgctggggggcaggaacatcaaggtgggcagacccagcaacatagggcaggcccagcccatcatagaccagttggctgaggaggcacgggccttcaaccgcatctacgtggcctctgtgcaccaggacctctcagacgatgacatcaagagcgtgtttgaggcctttggcaagatcaagtcctgcacactggcccgggaccccacaactggcaagcacaagggctacggcttcattgagtacgagaaggcccagtcgtcccaagatgctgtgtcttccatgaacctctttgacctgggtggccagtacttgcgggtgggcaaggctgtcacaccgcccatgcccctactcacaccagccacgcctggaggcctcccacctgccgctgctgtggcagctgctgcagccactgccaagatcacagctcaggaagcagtggccggagcagcggtgctgggtaccctgggcacacctggactggtgtccccagcactgaccctggcccagcccctgggcactttgccccaggctgtcatggctgcccaggcacctggagtcatcacaggtgtgaccccagcccgtcctcctatcccggtcaccatcccctcggtgggagtggtgaaccccatcctggccagccctccaacgctgggtctcctggagcccaagaaggagaaggaagaagaggagctgtttcccgagtcagagcggccagagatgctgagcgagcaggagcacatgagcatctcgggcagtagcgcccgacacatggtgatgcagaagctgctccgcaagcaggagtctacagtgatggttctgcgcaacatggtggaccccaaggacatcgatgatgacctggaaggggaggtgacagaggagtgtggcaagttcggggccgtgaaccgcgtcatcatctaccaagagaaacaaggcgaggaggaggatgcagaaatcattgtcaagatctttgtggagttttccatagcctctgagactcataaggccatccaggccctcaatggccgctggtttgctggccgcaaggtggtggctgaagtgtacgaccaggagcgttttgataacagtgacctctctgcgtgacagtggtccctctccccggacttgcacttgttccttgtttcctctgggttttatagtgatacagtggtgtccccggggccaggcgcgctctgcccagcccagcctacagtgcggataaaggtgcggatgctgctggccctgaaaaaaaaaaaaaaaaaaa

SEQ ID NO: 216 - DNA, 1830 bp, Homo sapiens
cgaggccggaactggcggactgcggcgcacttccgtagaggtggacatggcgtgcggctttcgccgcgctattgcttgccagctttccagagtgttgaatcttccaccagaaaacttgatcacatcaatatctgcagttccaatttcccaaaaagaagaagtagctgattttcagctttctgtggattctttattggaaaaagacaatgaccattcaagaccagatattcaagttcaagccaagagactagcagagaagctaagatgtgatacagtggtgagtgaaatcagtactggtcaaaggactgtaaatttcaaaataaacagagagctcttaacaaagacagtgctacaacaagtaattgaagatggctcaaaatatggattaaaaagtgaacttttctctggacttccccagaagaagattgtggttgaattcagttcacctaatgttgccaaaaaatttcatgttggacatttgcgttctaccatcataggaaattttatagcaaatctcaaagaagctttaggacatcaagtaataagaataaattaccttggcgattggggcatgcagtttggtcttctgggaactggcttccagctgtttggctatgaggaaaaactgcagtccaatcctctacagcatctctttgaagtttatgtacaagttaataaagaagcagcagatgataaaagtgtagcaaaagcagcacaggagttcttccaacgattggaactgggcgatgtgcaagcactttcactgtggcaaaaatttcgggacttgagcattgaagagtacattcgggtttacaagcgtctgggagtatattttgatgaatattcaggagaatcattttatcgtgaaaaatctcaagaggtcttaaagttgctggagagtaaaggactcctactgagaacaataaaaggaacggctgtagtagatctctctgggaatggcgacccctcctcaatttgtactgtaatgcgaagtgatgggacttctctctatgcaaccagagatcttgcagctgctatagatcgaatggacaagtataattttgatacaatgatatatgtgacagataaaggacaaaaaaagcattttcagcaagtattccaaatgctgaagatcatgggatatgactgggcagaaaggtgccagcacgtgccctttggagtagtacagggaatgaagactcgaagaggagatgtcactttcctggaagatgttttaaatgagattcaattaaggatgctacagaacatggcttcaattaagacaactaaagaactcaagaacccacaagagactgcagagagggtcgggctcgcagcactcattattcaggacttcaaaggtttactcttatctgactacaagttcagctgggatcgtgttttccagagtcgcggggacacaggagtcttcctacagtacacacacgcccgcctccacagtttggaagagacttttggatgtgggtacctgaatgacttcaacactgcttgtttacaagagccacagtctgtttcaattcttcagcatcttctcaggttcgacgaggtgctttataaatcatctcaggactttcaacccaggcatatcgtcagttaccttctaactttaagtcatcttgcagctgtggcacacaaaacactacaaataaaagatagtcctcctgaagtggctggggccagacttcatcttttcaaagctgtccgttctgtcctagccaatggaatgaaacttcttggaataacacctgtatgtaggatgtaatttccattaaaatggcttttaaaatgtcaaaaaaaaaaaaaaaaaaa

SEQ ID NO: 217 - DNA, 1070 bp, Homo sapiens
gcgattgctggggctgcagcgctgcctccgagaccgagagtgggtggagcgggtcttcctggaagggtgcgataaggccgggcgaggtgcctgggatgcttctccccttccgcgaggaagagatctaattgggtagggcgggtgtagactagcctgccgagccgcccgctggcacctgcagcctcctgggcgcccgcgggcccggcgagaaagttgttaaagggagcgaggtggttgttcctggggtccgaggcgcgcctctcacgccctgcccaacagaagccgcagtcccgtggggtctggagacgcagtttccttgttaatgacaataaatccctgctccccctgcctcagacatctacgcagcgaaatcgagcctggccttgagggtccacaccgcgaggaagatgcgtgcgcccattccagagcctaagcctggagacctgattgagatttttcgccctttctacagacactgggccatctatgttggcgatggatatgtggttcatctggcccctccaagtgaggtcgcaggagctggtgcagccagtgtcatgtccgccctgactgacaaggccatcgtgaagaaggaattgctgtatgatgtggccgggagtgacaagtaccaggtcaacaacaaacatgatgacaagtactcgccgctgccctgcacgaaaatcatccagcgggcggaggagctggtggggcaggaggtgctctacaagctgaccagtgagaactgcgagcactttgtgaatgagctgcgctatggagtcgcccgcagtgaccaggtcagagatgtcatcatcgctgcaagcgttgcaggaatgggcttggcagccatgagccttattggagtcatgttctcaagaaacaagcgacaaaagcaataactgaaaaagactgtctgtcagcgatgactttatacatcaagggggtcttgttttgctagagagtttggggtttggtttgtggatttcattgtgatttataataaggcttattttcacagaataaaataaagcaaaacgagggaggattttattgggggagtgcagcccaaaaaa

SEQ ID NO: 218 - DNA, 629 bp, Homo sapiens
acagcaaccagaaaacatctgctcacttccttcaaaatgggaaagatcaccttctacgaggacagggccttccagggccgcagctacgaatgcaccactgactgccccaacctacaaccctatttcagccgctgcaactccatcagggtggagagcggctgctggatgatctatgagcgccccaactaccagggccaccagtacttcctgcggcgtggggagtaccccgactaccagcaatggatgggcctcagcgactccatccgctcctgctgcctcatccccccgcactctggcgcttacagaatgaagatctacgacagagatgaattgaggggacaaatgtcagagctcacagacgactgtctctctgttcaggaccgcttccacctcactgaaattcactccctcaatgtgctggagggcagctggatcctctatgagatgcccaactacagggggaggcagtatctgctgaggccgggggagtacaggaggtttcttgattggggggctccaaatgccaaagttggctctcttagacgagtcatggatttgtactgaagtatttacgttttccacttttctcctttaaaatctaataaaatatttagcttgtgtttctggca

SEQ ID NO: 219 - DNA, 1344 bp, Homo sapiens
tgcagactgatatggattcaccactgctaacacctcctggttggaactacaggaatagaactggaaagggaaaaaaggcagcattcaccacatcccaatcctgaatccaagagtctaagatagtcccccactcctatctcaggcttagaggattagattaatctcctggagggaagactcttccttgaaacatttttttttatctgcctgtagctattgggataattcgggaaatccacagggacagttcaagtcatctttgtcctctactttctgttgcactctcagccttgttctctttttagaaactgcatggtaactattatatagctaaagaagagcattctgacctctgccctgggacttcctggatcctcctcttcttataaatacaagggcagagctggtatcccggggagccaggaagcagtgagcccaggagtcctcggccagccctgcctgcccaccaggaggatgaaggtctccgtggctgccctctcctgcctcatgcttgttgctgtccttggatcccaggcccagttcataaatgatgcagagacagagttaatgatgtcaaagcttccactggaaaatccagtagttctgaacagctttcactttgctgctgactgctgcacctcctacatctcacaaagcatcccgtgttcactcatgaaaagttattttgaaacgagcagcgagtgctccaagccaggtgtcatattcctcaccaagaaggggcggcaagtctgtgccaaacccagtggtccgggagttcaggattgcatgaaaaagctgaagccctactcaatataataataaagagacaaaagaggccagccacccacctccaacacctcctgagcctctgaagctcccaccaggccagctctcctcccacaacagcttcccacagcatgaagatctccgtggctgccattcccttcttcctcctcatcaccatcgccctagggaccaagactgaatcctcctcacggggaccttaccacccctcagagtgctgcttcacctacactacctacaagatcccgcgtcagcggattatggattactatgagaccaacagccagtgctccaagcccggaattgtcttcatcaccaaaaggggccattccgtctgtaccaaccccagtgacaagtgggtccaggactatatcaaggacatgaaggagaactgagtgacccagaaggggtggcgaaggcacagctcagagacataaagagaagatgccaaggccccctcctccacccaccgctaactctcagccccagtcaccctcttggagcttccctgctttgaattaaagaccactcatgctcttc

SEQ ID NO: 220 - DNA, 1514 bp, Homo sapiens
cgcgcctgcctctttctgagcggcatgaagccacctcccaggcggcgagcggccccggcgcgctatctgggcgaggtgaccggtcccgcgacctggagcgctcgcgagaagcggcagctagtgcgactcctgcaggcgcggcagggccagccggagccggacgccaccgagctggcccgggagctgcggggccggagcgaggctgagatccgggtcttcctccagcagctcaagggccgcgtagcccgggaggccattcagaaagtgcatccgggtggccttcagggaccaaggcgccgggaggcacagcccccagcccccatagaggtctggacggatctggctgagaagataacagggccactggaagaagccctggcagtggctttctcgcaggtgctcaccatcgcggccacggaaccggtcaccctcctgcactccaagccccccaagcccacgcaggcccgtggaaagcctttgctcctgagcgcccctggaggacaggaagaccccgcccctgaaatacctagctctgcccctgctgcacctagctccgcacccaggactcctgaccctgcccctgagaaaccttctgagtcgtcggctggtccctccactgaagaagactttgctgtggactttgagaagatctacaagtacttgtcctctgtctcccgaagtggccgcagccccgagctctcagcagctgagtccgctgtggtcctcgacctgctcatgtcacttccagaggagctgccactcctgccctgcacagccctggttgagcatatgacggagacgtacctacgcctgacagccccccagcccattcccgctggagggagcctggggcctgcagcagaaggggatggggctggctccaaggcaccagaggagacccccccagccaccgagaaggccgagcacagcgaactgaaatcgccttggcaagcagctgggatctgtcccctgaacccgttcctggtgcccctggagcttctgggtcgggcagccacccctgccaggtgaggggcatggcgggcaggaggccacaccaggccccccgccctgcccctcggttctgctcggctggccctggctctttctgaggatcccgtcatgggggaaggtccttgagatgatgctcagctgtggggcgggcctctaagatgccccatactttgggggtctcagaaatggaacccccgttgtacaggggttgggtgggggttgcaggactccactcacaagcctcctgatgtcaaggacaggcggacagggctggcctcccccagtccccaagccccactgtgccttgttgtctgctggggggccatagctggcactgcccaccgtaaaggccctcgcacattttcccccttcctgtacacctcggggccagcatcctcaccttcttcaactgaccagtcgtggttactccctgctgccaggtccttccccttcccgggggtattctgtgaccatgaataaagttaccattctctttctctttc

SEQ ID NO: 221 - DNA, 1733 bp, Homo sapiens
  misc_feature (19)..(19): n is a, c, g, or t
ttcggcacaggcgggagancggcggggccgaagcgtgaactcgcccgctccggcttgcttcccccgcgccgcctccccgcgccgctcggaagccatgtccgaggagaagcccaaggagggtgtgaagacagagaatgaccacatcaacctgaaggtggccgggcaggacggctccgtggtgcagttcaagatcaagaggcacacgtcgctgagcaagctgatgaaggcctactgcgagaggcagggcttgtcaatgaggcagatcagattcaggttcgacgggcagccaatcaatgaaactgacactccagcacagctgagaatggaggacgaggacaccatcgacgtgttccagcagcagacgggaggtgtgccggagagcagcctggcagggcacagtttctagagggcccgtccccagcccgggccgtccatcctcgcattgctgttgaatggtgagcacgtgaccatgccgaccacaaaggtgtctgcggaaactcgaggacattcaccacgatgattttcctctctttgatgtacttcaagtgcaactcaaaactatatctgcagggatgaatctgtaacttaaattgggccaatcagaattgttatctttgttcaggtaaaatgagttgcaagatattgtgggtacttttgtgtgctcatttgtgttttccccccctcctacaacatttttttaaccccaaaattatagcctgaatgttcgcttttagtctggccagggatctgactcctgagttggttgcctctcccctgctcactccagtcacatagagaattggtgtttcccgcagtggggattgcagctgttggacaggtattgggggcaaggttggtagggaggacagactgtcacttgctgttacaggcacaggtgattaaaatgctaaatattgcaaatttaagctttgtcagtatatggaaaagttgaagggaaaatactggaatgcttcttcaaaggttaaaaaataaccgagtcttttggtaatttgaccccacgtgctctctggccctcaagcatgtaacctcggggtctgaggcccaggacccacccccctgccacccctcccaccccactccctgctcagtacctggcgttggtacacaggcaaggattggcacaaccaaaattggcctttttctccctcttaatattgaagaaattcccacatttctcatttggtaatggtgttgtggcctcagatttcttctagtatttgcttctgatgaatgattatggtctatacataaaaaagtaagactaagtattgctgaatttgcagttatgttgtcgtgtataagagctacttccaagtgtggttacaaatgaacccatggaatgatgacttcatgttcttctcgtgggtttgtgccgtgctgctttccaaataggtattgaatttatgcattagtctggtgatttcagttctgtgaaatattttgggatctataccaattaaacattttcatagttctgcctattgtccttccctgaggctccattgctgcttggtggccattctctgcctttttacagtcacctgaacaatgacccatcatctcttgcttgcttgaaatcttgctgaaatgttctcatttcctgtttgctgtatgggctcgggtgggatgtttgttggctctgttgtgtttattcaccaatttgtacattatttgttgtcctttactactgtaaacagtaaatatagtttggt

SEQ ID NO: 222 - DNA, 1225 bp, Homo sapiens
ccgcagcgccggagtcaaacggttcccggcccagtcccgtcctgcagcagtctgcctcctctttcaacatgacagatgccgctgtgtccttcgccaaggacttcctggcaggtggagtggccgcagccatctccaagacggcggtagcgcccatcgagcgggtcaagctgctgctgcaggtgcagcatgccagcaagcagatcactgcagataagcaatacaaaggcattatagactgcgtggtccgtattcccaaggagcagggagttctgtccttctggcgcggtaacctggccaatgtcatcagatacttccccacccaggctcttaacttcgccttcaaagataaatacaagcagatcttcctgggtggtgtggacaagagaacccagttttggcgctactttgcagggaatctggcatcgggtggtgccgcaggggccacatccctgtgttttgtgtaccctcttgattttgcccgtacccgtctagcagctgatgtgggtaaagctggagctgaaagggaattccgaggcctcggtgactgcctggttaagatctacaaatctgatgggattaagggcctgtaccaaggctttaacgtgtctgtgcagggtattatcatctaccgagccgcctacttcggtatctatgacactgcaaagggaatgcttccggatcccaagaacactcacatcgtcatcagctggatgatcgcacagactgtcactgctgttgccgggttgacttcctatccatttgacaccgttcgccgccgcatgatgatgcagtcagggcgcaaaggaactgacatcatgtacacaggcacgcttgactgctggcggaagattgctcgtgatgaaggaggcaaagcttttttcaagggtgcatggtccaatgttctcagaggcatgggtggtgcttttgtgcttgtcttgtatgatgaaatcaagaagtacacataagttatttcctaggatttttccccctgtgaacaggcatgttgtattctataacacaatcttgagcattcttgacagactcctggctgtcagtttctcagtggcaactactttactggttgaaaatgggaagcaataatattcatctgaccagttttcctctaaagccatttccatgatgatgatgatgggactcaattgtattttttatttcagtcactcctgataaataacaaatttggagaaataaaaatatctaaaat

SEQ ID NO: 223 - DNA, 2277 bp, Homo sapiens
gactgcgcggcggcaacagcagacatgtcgggggtccggggcctgtcgcggctgctgagcgctcggcgcctggcgctggccaaggcgtggccaacagtgttgcaaacaggaacccgaggttttcacttcactgttgatgggaacaagagggcatctgctaaagtttcagattccatttctgctcagtatccagtagtggatcatgaatttgatgcagtggtggtaggcgctggaggggcaggcttgcgagctgcatttggcctttctgaggcagggtttaatacagcatgtgttaccaagctgtttcctaccaggtcacacactgttgcagcgcagggaggaatcaatgctgctctggggaacatggaggaggacaactggaggtggcatttctacgacaccgtgaagggctccgactggctgggggaccaggatgccatccactacatgacggagcaggcccccgccgccgtggtcgagctagaaaattatggcatgccgtttagcagaactgaagatgggaagatttatcagcgtgcatttggtggacagagcctcaagtttggaaagggcgggcaggcccatcggtgctgctgtgtggctgatcggactggccactcgctattgcacaccttatatggacggtctctgcgatatgataccagctattttgtggagtattttgccttggatctcctgatggagaacggggagtgccgtggtgtcatcgcactgtgcatagaggacgggtccatccatcgcataagagcaaagaacactgttgttgccacaggaggctacgggcgcacctacttcagctgcacgtctgcccacaccagcactggcgacggcacggccatgatcaccagggcaggccttccttgccaggacctagagtttgttcagttccaccccacaggcatatatggtgctggttgtctcattacggaaggatgtcgtggagagggaggcattctcattaacagtcaaggcgaaaggtttatggagcgatacgcccctgtcgcgaaggacctggcgtctagagatgtggtgtctcggtcgatgactctggagatccgagaaggaagaggctgtggccctgagaaagatcacgtctacctgcagctgcaccacctacctccagagcagctggccacgcgcctgcctggcatttcagagacagccatgatcttcgctggcgtggacgtcacgaaggagccgatccctgtcctccccaccgtgcattataacatgggcggcattcccaccaactacaaggggcaggtcctgaggcacgtgaatggccaggatcagattgtgcccggcctgtacgcctgtggggaggccgcctgtgcctcggtacatggtgccaaccgcctcggggcaaactcgctcttggacctggttgtctttggtcgggcatgtgccctgagcatcgaagagtcatgcaggcctggagataaagtccctccaattaaaccaaacgctggggaagaatctgtcatgaatcttgacaaattgagatttgctgatggaagcataagaacatcggaactgcgactcagcatgcagaagtcaatgcaaaatcatgctgccgtgttccgtgtgggaagcgtgttgcaagaaggttgtgggaaaatcagcaagctctatggagacctaaagcacctgaagacgttcgaccggggaatggtctggaacacagacctggtggagaccctggagctgcagaacctgatgctgtgtgcgctgcagaccatctacggagcagaggcgcggaaggagtcacggggcgcgcatgccagggaagactacaaggtgcggattgatgagtacgattactccaagcccatccaggggcaacagaagaagccctttgaggagcactggaggaagcacaccctgtcctttgtggacgttggcactgggaaggtcactctggaatatagacccgtaatcgacaaaactttgaacgaggctgactgtgccaccatcccgccagccattcgctcctactgatgagacaagatgtggtgatgacagaatcagcttttgtaattatgtataatagctcatgcatgtgtccatgtcataactgtcttcatacgcttctgcactctggggaagaaggagtacattgaagggagattggcacctagtggctgggagcttgccaggaacccagtggccagggagcgtggcacttacctttgtcccttgcttcattcttgtgagatgataaaactgggcacagctcttaaataaaatataaatgag

SEQ ID NO: 224 - DNA, 1037 bp, Homo sapiens
gcgtcccggaagcgcccgcggggccgggtgcgatggcggcggtggctgcgttgcagctggggctgcgggcggcggggctgggacgggccccggccagcgccgcctggaggagcgtcctcagggtctccccgcgcccaggggtggcctggaggccaagcagatgtggcagttctgcagcagaagcatctgccacaaaagcggaagatgactcctttcttcagtgggtcctgctcctcatccctgtgactgcctttggcttggggacatggcaggtccagcgtcggaagtggaagctgaacctgattgcagagttggagtccagagttctggctgagcctgtccctctgccagccgacccaatggaactgaaaaatctggagtataggccagtgaaggtcagggggtgctttgaccattccaaggagctgtatatgatgccccggaccatggtggaccctgtccgggaggcccgggagggcggcctcatctcctcctcaactcagagtggggcctatgtggtcactcccttccactgcaccgacctgggagtcaccatcctggtaaatagagggttcgttcccaggaagaaagtgaatcctgaaacccggcagaaaggccagattgagggagaagtggacctcattgggatggtgaggctgacagaaaccaggcagccttttgtccctgagaacaatccagaaaggaaccactggcattatcgagacctggaagctatggccagaatcacaggcgcagagcccatcttcattgatgccaacttccagagcacagtccctggaggacccattggagggcaaaccagagttactctgaggaacgagcatctgcagtacatcgtgacctggtatggactctctgcagctacatcctacctgtggtttaagaaattcctacgtgggacacctggtgtgtgacagatcagctgctgaagccctgtccctggataatgcagtatttcaagactgcctttatgctggatcatgtgctactggtataaagttctggccttctacctt

SEQ ID NO: 225 - DNA, 5026 bp, Homo sapiens
cagctagccgcctcctgcaggggctcgggagagcaattcggcggcccctgcagggcagctgaagccatggaagcctccgcaggtcgctgatcagggccaggcggctgcagcagcgactgcagaggcgctgcgccaagccgggccggagtggtgcgagccggcggggctgcggagggccagtggactcagcccccgggataccgcccatcccaccccttactcggacccacagcctcatggccatgtccctgccaggaagtagacggacctctgctggatcacgcaggcgcacctctccacctgtgagcgtgcgggatgcctacggcacctcttcgctcagcagcagcagcaattctggctcctacaagggcagtgacagcagtcccacgccaaggcgctccatgaaatacacgctgtgcagtgacaaccatggcatcaagcccccgaccccggagcagtacctgacccccctgcagcagaaggaggtgtgcatccggcacctgaaagcccggctgaaggacacacaggaccggctccaggaccgggacacagagattgatgacctgaagacgcagctgtcacgcatgcaggaggactggattgaggaggagtgccaccgcgtggaggcccagctggccctgaaggaggcccgaaaggagatcaagcagctcaagcaggtcatcgacactgtcaagaacaacctgattgacaaggacaaggggctgcagaagtacttcgtggacatcaacatccagaacaagaagctggagacgctgctgcacagcatggaggtggcccagaatggcatggccaaggaggatggcactggggagtcagccggtgggtcccctgcccgctccctcacccgcagctccacctacaccaagctgagtgacccggctgtctgtggtgaccgccagccgggtgatccctccagcggctctgctgaggatggggcagacagtggctttgcagcagccgatgacacactgagccggacggacgcgctggaagccagcagcctgctgtcgtcgggggtggactgtggcaccgaggagacctcgctgcacagctccttcggcctgggcccccgcttccctgccagcaacacctatgagaagctgctgtgtggcatggaggctggtgtgcaggccagctgcatgcaggagcgtgccatccagacagacttcgtgcagtaccagcctgaccttgacaccatcctggagaaagtgacccaggcccaggtctgtgggacagaccctgagtcaggggacaggtgcccagagctggatgcccacccttcagggcccagagaccccaactcagcagtggtggtgacagtgggtgatgagctagaggccccagagcccatcacccgtggacccaccccacagcggcctggtgccaaccccaaccctggccagtcggtgagcgtggtgtgccccatggaagaggaggaggaggctgccgtggctgagaaggagcccaagagctactggagccgccactacatcgtggatctgctggctgtggtggtgccggccgtgcccacggtggcctggctttgccgctcccagcggcgccagggccagcccatctacaacatcagctccctgctgcggggctgctgcactgtggccttgcactccatccgcaggatcagctgccgctcgctgagccagccgagtcccagcccagcgggcggcggctcccagctctgagggggcccattccggcagcggcgcctgcggcctgaccactgattgtagggatgccgttcccccctcccttctcccatgggcatcatcttatttatttagttttgggtgtggaactgtttctttttttcaagatgttaaaacagtcccgtggaaggagcaggggttggagaaaggcatcccaaagcttcgatggagagcagggaagggggacccaaggcaggaggtacaccagctggacaaattgcagggaggggagggagcgagggccaacccggcccctctgtccccttggctcttcagacagggccagccctgctcaggaagtctctggctgtcttcatgtggggaagccgggcttgagttgcccataggcccctgccctgcaccatcctgtccagtgccctgcgcactccatgccgtctcttccaagccaccttgcccgcagcccaggctcctgggccagtgctctctcctcaaatggaggcagccatggcctgaagtgcagatcactgacccagggctcagagcagaggccagaaccactgggccggccggcattccagcctccccagactgctgcccaccttgggactcaggagctcagtcaaggccacaggctggaggagagacggggctgggcgcaaggtggcggagggcagtgtgggttctgtgtctgtctgttcatcccaggctttcccgtcatccctttcctcttggcacttctgggtgtgtcagtcattattcctgtgaggtagctaagcccggcaagctcagtgctggggtaggagggcctgcctgagtcccagctcccagctggagaatccaccagcacaagaagaggaggcaggggcagaaacccaagggggctcccccagccttccaaggtgaggccatctcatctgcaggctgggaggcagggctggactcaggaacccacagcttactgaaaaagccagaggccatgactgcccccagaaacttgccccgagtttctctggggccctcgggcccaacttctgctttgcactatgttcactttggggttggttctcagccatccaagggtctccagtgaggtggctgcttgctgtctgagatgagggttcctaaaccttaaacctctctgcctctggaggagggtggggtattctggcaggatgaatcgcaggatggcgcgtactgaagccacgatgttcatccaggccaaagcagggtgtcctgggataggtttcctaggcaggggcgtggcagagcaggtaggcgccctgcagcctccctgctcccagcccaaggccagtcggcctgggaagttcactgccccaactcttttcccgggaccatactgagtcccccagccacgctgctgacattaccattattattttaccaagtaaactcactccttttcccccacaggggttacacccatctggttgtcccacccactcttcagaggctaggccccacctctgggggttggagggaccctgtgtcttactcgcccctctggcctaagggccactctggttatctgccaaggttgcttgccctcaccccaatgctccaacagccattgcctaactcatgggctctgcccttctgctcggtgccctccacgtgaggcggggcacctgcatgcactgggagggggcggctggcccagccctcggggcaggagccccctctgccacacgctttgtgcctccaaagctccccccgccttggtcagggcctcagaccagccaacctttgtggaataagccccagcccagccaaaccaaacccagatgcctgaggcctggctggggctgcccccgcaggacactgtggccatgccacggagggggcagtggacaaaaccaatccaaagccaagccgggactggctgcggacccagcctcctgtgccgcgcactcacggagctgcgtagtctcctcagacatagtcaaagctttgccgagaaaagaaatgtatgaactatatttgacaacataaaatctctctatttttcaccactggaatttagtcaagcttcaggcccctctgctcctgtctgtgtcttgcgtctgtggccttcctattgtgtcttgtgttttggtggatgtgacagggctggggccacagtctactctgtctctgctgctagagaagccacctgtggaggactgggctgtggttgggcctgaggcctgtggaggaggtgagtgtagccagcagcggccgtctactcctgttctggcctgagaccaccggtgtgggtcacgagggccctggcccacagtgttgagggtcctctctttcgggggctctcctggggccttcgatgggcttttcttcttgtcagtggagggagcagctccccactcagccctgggacaggccctgggactgtggtggccggtggccctggcccagctctggagtgcatgtgtgtgtgctcagatcccgcatctatgcaaaggtgcaggctgcctgtgaggctccaggcggtggaggtgcggcagctgctgctcaggtgccatgccctgaagaggcagggtacacatggggctgggagggcaaagatggggcggggcctccccctgagagagctcaccctccacagtgacccttttccttcctgcctaatacctcctcccgttgggctgtgacttttcctcctgccctcagcctctgaaacagaaatctttggggcctcccctttccccagcgtctggcaagagctgatgaggtcctgaggaacagtgtccccaggaaccaccttctggagcctagcggccagacgtggcttctcctgagttctagggctcgggccagagtggcactactgcccggccagtccaggctcaggcaggaatcggacgctggggcccgggctctgcacagagagctgggcttgagtggagtttattgtagatttctcccaaggggatcacttagcttctcactgacacacccttcccaattgccacaagcgcaggggtatcttacagcactttggggaggggtgggacaaactgcaaggttctggggccaaggcctacccaggggcctctgcccagagaactcacaaccccctctctgacctaggggacaatgcaaacaggtcacagtgcattcccatattaggccatccccttcacgaagaattcaggggatgtgggaagtggggaggcggggagggatcttgactcttgtctcctttgtccttttgttcagacagagttgtacctgcagcagacaactctgaattaaagcatgaaaacacagcaaaaaaaaaaaaaaaaaaaaaaaaaaaaaaaaaa

SEQ ID NO: 226 - DNA, 979 bp, Homo sapiens
ctgattatagttctgaggccctagctactcactttgcaaactccaggctccggtcgcgcacgggacgaactgcggggagtgagccgcgcgggccgccgtagtcagctgctaagagcaggaagagtccgagcggcgggcggagtctgcaggatggcaccggacccctggttctccacatacgattctacttgtcaaattgcccaagaaattgctgagaaaattcaacaacgaaatcaatatgaacgaaaaggtgaaaaggcaccaaagcttaccgtgacaatcagagctttgttgcagaacctgaaggaaaagatcgcccttttgaaggacttattgctaagagctgtgtcaacacatcagataacacagcttgaaggggaccgaagacagaacctcttggatgatcttgtaactcgagagagactacttctggcatcctttaagaatgagggtgccgaaccagatctaatcaggtccagcctgatgagtgaagaggctaagcgaggagcacccaacccttggctctttgaggagccagaggagaccagaggcttgggttttgatgaaatccggcaacagcagcagaaaattatccaagaacaggatgcaggccttgatgccctttcctctatcataagtcgccaaaaacaaatggggcaggaaattgggaatgaattggatgaacaaaatgagataattgacgaccttgccaacctagtggagaacacagatgaaaaacttcgcaatgaaaccaggcgggtaaacatggtggacagaaagtcagcctcttgtgggatgatcatggtgattttactgctgcttgtggctatcgtggttgttgcagtctggccgaccaactgatggcagtaaagagaccaccagcagtgacacctggcaatgacagatgcaagcccaacacccttttggtacgcaaaacctgctctcaataaattcccccaaagctctgaaaaaaaaaaaa

SEQ ID NO: 227 - DNA, 2019 bp, Homo sapiens
acgtgtatcgctgccgtcaagatggaggggcctttgtccgtgttcggtgaccgcagcactggggaaacgatccgctcccaaaacgttatggctgcagcttcgattgccaatattgtaaaaagttctcttggtccagttggcttggataaaatgttggtggatgatattggtgatgtaaccattactaacgatggtgcaaccatcctgaagttactggaggtagaacatcctgcagctaaagttctttgtgagctggctgatctgcaagacaaagaagttggagatggaactacttcagtggttattattgcagcagaactcctaaaaaatgcagatgaattagtcaaacagaaaattcatcccacatcagttattagtggctatcgacttgcttgcaaggaagcagtgcgttatatcaatgaaaacctaattgttaacacagatgaactgggaagagattgcctgattaatgctgctaagacatccatgtcttccaaaatcattgggataaatggtgatttctttgctaacatggtagtagatgctgtacttgctattaaatacacagacataagaggccagccacgctatccagtcaactctgttaatattttgaaagcccatgggagaagtcaaatggagagtatgctcatcagtggctatgcactcaactgtgtggtgggatcccagggcatgcccaagagaatcgtaaatgcaaaaattgcttgccttgacttcagcctgcaaaaaacaaaaatgaagcttggtgtacaggtggtcattacagaccctgaaaaactggaccaaattagacagagagaatcagatatcaccaaggagagaattcagaagatcctggcaactggtgccaatgttattctaaccactggtggaattgatgatatgtgtctgaagtattttgtggaggctggtgctatggcagttagaagagttttaaaaagggaccttaaacgcattgccaaagcttctggagcaactattctgtcaaccctggccaatttggaaggtgaagaaacttttgaagctgcaatgttgggacaggcagaagaagtggtacaggagagaatttgtgatgatgagctgatcttaatcaaaaatactaaggctcgtacgtctgcatcgattatcttacgtggggcaaatgatttcatgtgtgatgagatggagcgctctttacatgatgcactttgtgtagtgaagagagttttggagtcaaaatctgtggttcccggtgggggtgctgtagaagcagccctttccatataccttgaaaactatgcaaccagcatggggtctcgggaacagcttgcgattgcagagtttgcaagatcacttcttgttattcccaatacactagcagttaatgctgcccaggactccacagatctggttgcaaaattaagagcttttcataatgaggcccaggttaacccagaacgtaaaaatctaaaatggattggtcttgatttgagcaatggtaaacctcgagacaacaaacaagcaggggtgtttgaaccaaccatagttaaagttaagagtttgaaatttgcaacagaagctgcaatcaccattcttcgaattgatgatcttattaaattacatccagaaatccttcggattaaacatggaagttatgaagatgctgttcactctggagcccttaatgattgatctgatgttccttttatttataacaatgttaaatgcaatgtcttgtaccttgagttgagtattacacattaaagtaaagtacaagctgtaaacttgggtttttgtgatgtaggaaatggtttccatctgtactttggtcctctgatttcagatattgcaacctagtactttattagtttaaaaagaaattgaggttgttcaaagtttaagcaattcattctctctgaacacacattgctattcccatcccacccccaatgcacagggctgcaacaccacgacttctgcccattctctccagtgtgtgtaacagggtcacaagaattc

SEQ ID NO: 228 - DNA, 2156 bp, Homo sapiens
ggaggccagtgcgcggccgcggtgctctaccggcgtgtcgctccgccccagggagagccggcgctaccatggaggagtaccatcgccactgcgacgaggttggcttcaatgctgaggaagcccacaatattgtcaaagagtgtgtagatggggttttaggtggtgaagattataatcacaacaacatcaaccagtggactgcaagcatagtggaacaatccttaacacacctggttaagttgggaaaagcctataaatatattgtgacctgtgcagtggtccagaagagcgcatatggctttcacacagccagctcctgtttttgggataccacatctgatggaacctgtaccgtaagatgggagaaccggaccatgaactgtattgtcaacgtttttgccattgctattgttctttaactgactaaaaatgttgggctaaagccattaacttaagaatttgtcagtgtatcctttccaaaaagagtaatagttgtttactagtgtgctagatgaaaagcgtgcaatatgctttaaagctatcaacaaaaactgaatattataagcaagcaatatcatagtaattggcagattagctcatattctatacagcatcgtttaaataggaaaaatttaatgctagcaaaaaataaatttagaatatggcatgacatgaaaatacaatcttatatttacaccagcttttcactaatattttgtacctaaggtgatggggaactccattcagataataaaattctctttcagctagagaagttaacaggaataaatatatgaacaaaaaagctgcaaggataaatgtggagaaaatgatgagaattagctaacatttttaagtttttttaaactttcttcccctcagttgtacttaatatttagtggaaagtaataatttttttattttctatcaactaatagtatagtaacaactatgattaacttgtttactttttctgaggattagtaaatcaattttttttaatttcaaattttggatttacacttgagggtaaattaaatctggtaaactgaatttcctagttaaataaaattagttgcagtatatgatgaacagtgtatgactcaaacagctgccttacaattcactcattccatgtggaacaaacatttatcagatgcctattatgggcatatgtctctgctaagcaccatagttgtcaatgtgctgtgcaaatgctaagttccttttagcaattgttcagttggaagacgtattaatatttggggaaggaaaagaaagtagttgttttacaagggaggaaaaaagtgaatctggttacacatatggaagtaagcaaaatgaaaagcacttattgctttctgacagaattatagatgtaattttaagagttgctcctagcaagttaaaagtgcatataaaatatgcaactcttagttaaaggccttattatcagtcttacctatacaagtagtaaattttgtcattgctttagttacaaccatctgtaaataacttaaaagacttattatgtggggttcaaattgagtggaataaagtatagattaaaagtatacaatccttagcacgttatctcagggcttatgaaatgtaattaaatttattaagaaaatagatgaaaaattagggtacacagctggccaccaaatgcgaagtcaatctgctacttaaccctgaaaacaaaatcagttttgcatattaccactaacactaatacatatagagagcggaaccataactcattgaattttggagaggaataagcttagcgttaatattgacaatattaaggcaatattcttgtaggaatactatgtgcatgtttgatattttgccaaataacaataattaataattgttcaatgtttaagaataatattaacaaaataaaggagtttaatgcagtgatctttgtttttggcacatcaaaaattctcagtcattattcatgtttcttttatgctgctggcttttgtgccctggaagatcataatagtgaccaaaatatacatgcagacttgttttttattattgttgtttaagcataatttaagaaaaaaaatttttacctggtgaacttgctatctgctctgtttctagttaaaatataataaatattatcttcctgtgctgta

SEQ ID NO: 229 - DNA, 4236 bp, Homo sapiens
ggtgggcggggggaggaggcggccctagcgccattttgtgggagcgaagcggtggctgggctgcgcttgggtccgtcgctgcttcggtgtccctgtcgggcttcccagcagcggcctagcgggaaaagtaaaagatgtctgaatatattcgggtaaccgaagatgagaacgatgagcccattgaaataccatcggaagacgatgggacggtgctgctctccacggttacagcccagtttccaggggcgtgtgggcttcgctacaggaatccagtgtctcagtgtatgagaggtgtccggctggtagaaggaattctgcatgccccagatgctggctggggaaatctggtgtatgttgtcaactatccaaaagataacaaaagaaaaatggatgagacagatgcttcatcagcagtgaaagtgaaaagagcagtccagaaaacatccgatttaatagtgttgggtctcccatggaaaacaaccgaacaggacctgaaagagtattttagtacctttggagaagttcttatggtgcaggtcaagaaagatcttaagactggtcattcaaaggggtttggctttgttcgttttacggaatatgaaacacaagtgaaagtaatgtcacagcgacatatgatagatggacgatggtgtgactgcaaacttcctaattctaagcaaagccaagatgagcctttgagaagcagaaaagtgtttgtggggcgctgtacagaggacatgactgaggatgagctgcgggagttcttctctcagtacggggatgtgatggatgtcttcatccccaagccattcagggcctttgcctttgttacatttgcagatgatcagattgcgcagtctctttgtggagaggacttgatcattaaaggaatcagcgttcatatatccaatgccgaacctaagcacaatagcaatagacagttagaaagaagtggaagatttggtggtaatccaggtggctttgggaatcagggtggatttggtaatagcagagggggtggagctggtttgggaaacaatcaaggtagtaatatgggtggtgggatgaactttggtgcgttcagcattaatccagccatgatggctgccgcccaggcagcactacagagcagttggggtatgatgggcatgttagccagccagcagaaccagtcaggcccatcgggtaataaccaaaaccaaggcaacatgcagagggagccaaaccaggccttcggttctggaaataactcttatagtggctctaattctggtgcagcaattggttggggatcagcatccaatgcagggtcgggcagtggttttaatggaggctttggctcaagcatggattctaagtcttctggctggggaatgtagacagtggggttgtggttggttggtatagaatggtgggaattcaaatttttctaaactcatggtaagtatattgtaaaatacatatgtactaagaattttcaaaattggtttgttcagtgtggagtatattcagcagtatttttgacatttttctttagaaaaaggaagagctaaaggaattttataagttttgttacatgaaaggttgaaatattgagtggttgaaagtgaactgctgtttgcctgattggtaaaccaacacactacaattgatatcaaaaggtttctcctgtaatattttatccctggacttgtcaagtgaattctttgcatgttcaaaacggaaaccattgattagaactacattctttaccccttgttttaatttgaaccccaccatatggatttttttccttaagaaaatctccttttaggagatcatggtgtcacagtgtttggttcttttgttttgttttttaacacttgtctcccctcatacacaaaagtacaatatgaagccttcatttaatctctgcagttcatctcatttcaaatgtttatggaagaagcacttcattgaaagtagtgctgtaaatattctgccataggaatactgtctacatgctttctcattcaagaattcgtcatcacgcatcacaggccgcgtctttgacggtgggtgtcccatttttatccgctactctttatttcatggagtcgtatcaacgctatgaacgcaaggctgtgatatggaaccagaaggctgtctgaacttttgaaaccttgtgtgggattgatggtggtgccgaggcatgaaaggctagtatgagcgagaaaaggagagagcgcgtgcagagacttggtggtgcataatggatattttttaacttggcgagatgtgtctctcaatcctgtggctttggtgagagagtgtgcagagagcaatgatagcaaataatgtacgaatgttttttgcattcaaaggacatccacatctgttggaagacttttaagtgagtttttgttcttagataacccacattagatgaatgtgttaagtgaaatgatacttgtactccccctacccctttgtcaactgctgtgaatgctgtatggtgtgtgttctcttctgttactgatatgtaagtgtggcaatgtgaactgaagctgatgggctgagaacatggactgagcttgtggtgtgctttgcaggaggacttgaagcagagttcaccagtgagctcaggtgtctcaaagaagggtggaagttctaatgtctgttagctacccataagaatgctgtttgctgcagttctgtgtcctgtgcttggatgctttttataagagttgtcattgttggaaattcttaaataaaactgatttaaataatatgtgtctttgttttgcagccctgaatgcaaagaattcatagcagttaattccccttttttgacccttttgagatggaactttcataaagtttcttggcagtagtttattttgcttcaaataaacttatttgaaaagttgtctcaagtcaaatggattcatcacctgtcatgcattgacacctgatacccagacttaattggtatttgttcttgcattggccaaagtgaaaatttttttttttcttttgaaatctagttttgaataagtctgggtgaccgcacctaaaatggtaagcagtaccctccggctttttcttagtgcctctgtgcatttgggtgatgttctatttacatggcctgtgtaaatctccattgggaagtcatgccttctaaaaagattcttatttgggggagtgggcaaaatgttgattattttctaatgctttgtagcaaagcatatcaattgaaaagggaatatcagcaccttcctagtttgggatttgaaaagtggaattaattgcagtagggataaagtagaagaaaccacaaattatcttgtgcctgaaatccattaagaggcctgatagctttaagaattagggtgggttgtctgtctggaagtgttaagtggaatgggctttgtcctccaggaggtgggggaatgtggtaacattgaatacagttgaataaaatcgcttacaaaactcacactctcacaatgcattgttaagtatgtaaaagcaataacattgattctctgttgtacttttttgtaactaattctgtgagagttgagctcattttctagttggaagaatgtgatatttgttgtgttggtagtttacctaatgcccttacctaattagattatgataaataggtttgtcattttgcaagttacataaacatttatcaatgaagtcatcctttagacttgtaatcgccacattgtttcattattcagtttcctctgtaaagggatcttgagttgttttaattttttttttctgcatctgaatctgcatgatttccaaaccctgtaccatctgaattttgcattttagcacttgcactattactcagcagcagtaacatggtaacacttaaaatggtactcggggacctccaaagactaaactgacaagccttcaaggagcccaggggtaagttaacttgtcaacggcatggtttaatcccttctttacacttgtgtaaatttcagttactggtcatagaaggctttcaatgttgagtggccttttattaacatgtttatggtactgcatagatacgggtatttattttaccctaagaagattttgaagtttaaaagtacttaaactatttggcaaagatttgtttttaaaaatctatttggtcaatctaaatgcattcattctaaaaaattttttgaaccagataaataaaatttttttttgacaccacaaaaaaaaaaaaaaaaaaaa

SEQ ID NO: 230 - DNA, 1202 bp, Homo sapiens
gagcaaagggcacgtgagcgaggcgcccgaagccgtcgcggcggggaccatgttgcttccgaacatcctgctcaccggtacaccaggggttggaaaaaccacactaggcaaagaacttgcgtcaaaatcaggactgaaatacattaatgtgggtgatttagctcgagaagtctgatcatcggatatcatggagtctggcaagacggcttctcccaagagcatgccgaaagatgcacagatgatggcacaaatcctgaaggatatggggattacagaatatgagccaagagttataaatcagatgttggagtttgccttccgatatgtgaccacaattctagatgatgcaaaaatttattcaagccatgctaagaaagctactgttgatgcagatgatgtgcgattggcaatccagtgccgcgctgatcagtcttttacctctcctcccccaagagattttttattagatattgcaaggcaaagaaatcaaacccctttgccattgatcaagccatattcaggtcctaggttgccacctgatagatactgcttaacagctccaaactataggctgaaatctttacagaaaaaggcatcaacttctgcgggaagaataacagtcccgcggttaagtgttggttcagttactagcagaccaagtactcccacactaggcacaccaaccccacagaccatgtctgtttcaactaaagtagggactcccatgtccctcacaggtcaaaggtttacagtacagatgcctacttctcagtctccagctgtaaaagcttcaattcctgcaacctcagcagttcagaatgttctgattaatccatcattaatcgggtccaaaaacattcttattaccactaatatgatgtcatcacaaaatactgccaatgaatcatcaaatgcattgaaaagaaaacgtgaagatgatgatgatgacgatgatgatgatgatgactatgataatctgtaatctagccttgctgaatgtaacatgtatacttggtcttgaattcattgtactgatattaaacatgcatgctggatgttttcaagttgtgttttagaaaactaataataatgagtaaacacagttaccatacttttcaattgaaatgaaggtttttcatcagccttaaaagtgtaagaaaaataaagttgtcattcattcgaaaaaaaaaaaaaaaaaaaaa

SEQ ID NO: 231 - DNA, 2172 bp, Homo sapiens
ctgcgccctctcctataaagcagacgccgcgccgcgctgcgacgctgtagtggcttcgtcttcggtttttctcttccttcgctaacgcctcccggctctcgtcagcctcccgccggccgtctccttaacaccgaacaccatgccttcaattaagttgcagagttctgatggagagatatttgaagttgatgtggaaattgccaaacaatctgtgactattaagaccatgttggaagatttgggaatggatgatgaaggagatgatgacccagttcctctaccaaatgtgaatgcagcaatattaaaaaaggtcattcagtggtgcacccaccacaaggatgaccctcctcctcctgaagatgatgagaacaaagaaaagcgaacagatgatatccctgtttgggaccaagaattcctgaaagttgaccaaggaacactttttgaactcattctggctgcaaactacttagacatcaaaggtttgcttgatgttacatgcaagactgttgccaatatgatcaaggggaaaactcctgaggagattcgcaagaccttcaatatcaaaaatgactttactgaagaggaggaagcccaggtaggtagcacacagttttgtctttgatcacatgctcttaaaaagggagtaacacctataacatgccagcaaaagaggtgactgtatcaagtagtcttgatactttagggataatatgtacttaatgtgtcttaaacatactcttactgttctgtctttatgaatctgaacacttagatgatactgcattttaagcataagaacaattagttttcaatgagaagagctcttgttaatgtattaacagttactagttttggcacctgcaactttctgtatagaccatacatatctgacatcagaaaagcaggccctagagagaagtatatactagggtactttagagcaacttaatgaggggaggaaatgaaagaatagatcagaatgattttgttgacatgactacagactgaaataatgtgaatgaattaactgaatttgctctgtcaactttagtaaattgcccattgcctttgctttgttcataatttcagcagggcagaataaaaaccatgggaggcaaagaaaggaaatccggaaatatagtcttaacctggtgttgttctaattttccatctgttcttctgactcaactcactggctatcgatgaatcagtaggtagtatttataagtcttaggaaagactactcaagttaaggtacttccctatatccatctcttttaggtacgcaaagagaaccagtggtgtgaagagaagtgaaatgttgtgcctgacactgtaacactgtaaggattgttccaaatactagttgcactgctctgtttataattgttaatattagacaaacagtagacaaatgcagcagcaagtcaattgtattagcagaatattgtcctcattgcatgtgtagtttgagcacagatcccaaaccttacggccaagtttcttctagtatgatggaaagtttcttttttctttgctctgaataaaactgaactgtgggttctctataagtggcattttgggctttccctcttttttgtaaagcaatgtctgcctagtttattgtccagttaactttagtgaccttttaaaagttggcattgtaaataaaacaacttgcaaaaaagttttctggaatagaattaacaaaatattatctttattcatgagttggaaactggaaaaaggcttcttgaagtaaatgttctgagtggagctactaggatgtcttccagcctcctgcagtcaaggagtaccactgtattgattagcctgtatgtagcagggctcccttcattgcatctgaggacttgttttctttttctttatttttaatcctcttagttttaaatatattgcctagagactcagttactacccagtttgtggttttttgggagaaatgtaactggacagttagcttttcaattaaaaagacacttaacccatgtgggatgtcatctttttataattagtgttcccatgtggagaaaattattcacactacttgcatgtaaagaataatttaacttttaacattaaaatatgtggtaaaacccagaaagcatccatcatgaatgcaagatactttcaataaaaagtaagttatat

SEQ ID NO: 232 - DNA, 3249 bp, Homo sapiens
cgtggccctgtggcagccgagccatggtttctaaactgagccagctgcagacggagctcctggcggccctgctcgagtcagggctgagcaaagaggcactgatccaggcactgggtgagccggggccctacctcctggctggagaaggccccctggacaagggggagtcctgcggcggcggtcgaggggagctggctgagctgcccaatgggctgggggagactcggggctccgaggacgagacggacgacgatggggaagacttcacgccacccatcctcaaagagctggagaacctcagccctgaggaggcggcccaccagaaagccgtggtggagacccttctgcaggaggacccgtggcgtgtggcgaagatggtcaagtcctacctgcagcagcacaacatcccacagcgggaggtggtcgataccactggcctcaaccagtcccacctgtcccaacacctcaacaagggcactcccatgaagacgcagaagcgggccgccctgtacacctggtacgtccgcaagcagcgagaggtggcgcagcagttcacccatgcagggcagggagggctgattgaagagcccacaggtgatgagctaccaaccaagaaggggcggaggaaccgtttcaagtggggcccagcatcccagcagatcctgttccaggcctatgagaggcagaagaaccctagcaaggaggagcgagagacgctagtggaggagtgcaatagggcggaatgcatccagagaggggtgtccccatcacaggcacaggggctgggctccaacctcgtcacggaggtgcgtgtctacaactggtttgccaaccggcgcaaagaagaagccttccggcacaagctggccatggacacgtacagcgggccccccccagggccaggcccgggacctgcgctgcccgctcacagctcccctggcctgcctccacctgccctctcccccagtaaggtccacggtgtgcgctatggacagcctgcgaccagtgagactgcagaagtaccctcaagcagcggcggtcccttagtgacagtgtctacacccctccaccaagtgtcccccacgggcctggagcccagccacagcctgctgagtacagaagccaagctggtctcagcagctgggggccccctcccccctgtcagcaccctgacagcactgcacagcttggagcagacatccccaggcctcaaccagcagccccagaacctcatcatggcctcacttcctggggtcatgaccatcgggcctggtgagcctgcctccctgggtcctacgttcaccaacacaggtgcctccaccctggtcatcggcctggcctccacgcaggcacagagtgtgccggtcatcaacagcatgggcagcagcctgaccaccctgcagcccgtccagttctcccagccgctgcacccctcctaccagcagccgctcatgccacctgtgcagagccatgtgacccagagccccttcatggccaccatggctcagctgcagagcccccacgccctctacagccacaagcccgaggtggcccagtacacccacacgggcctgctcccgcagactatgctcatcaccgacaccaccaacctgagcgccctggccagcctcacgcccaccaagcaggtcttcacctcagacactgaggcctccagtgagtccgggcttcacacgccggcatctcaggccaccaccctccacgtccccagccaggaccctgccggcatccagcacctgcagccggcccaccggctcagcgccagccccacagtgtcctccagcagcctggtgctgtaccagagctcagactccagcaatggccagagccacctgctgccatccaaccacagcgtcatcgagaccttcatctccacccagatggcctcttcctcccagtaaccacggcacctgggccctggggcctgtactgcctgcttggggggtgatgagggcagcagccagccctgcctggaggacctgagcctgccgagcaaccgtggcccttcctggacagctgtgcctcgctccccactctgctctgatgcatcagaaagggagggctctgaggcgccccaacccgtggaggctgctcggggtgcacaggagggggtcgtggagagctaggagcaaagcctgttcatggcagatgtaggagggactgtcgctgcttcgtgggatacagtcttcttacttggaactgaagggggcggcctatgacttgggcacccccagcctgggcctatggagagccctgggaccgctacaccactctggcagccacacttctcaggacacaggcctgtgtagctgtgacctgctgagctctgagaggccctggatcagcgtggccttgttctgtcaccaatgtacccaccgggccactccttcctgccccaactccttccagctagtgacccacatgccatttgtactgaccccatcacctactcacacaggcatttcctgggtggctactctgtgccagagcctggggctctaacgcctgagcccagggaggccgaagctaacagggaaggcaggcagggctctcctggcttcccatccccagcgattccctctcccaggccccatgacctccagctttcctgtatttgttcccaagagcatcatgcctctgaggccagcctggcctcctgcctctactgggaaggctacttcggggctgggaagtcgtccttactcctgtgggagcctcgcaacccgtgccaagtccaggtcctggtggggcagctcctctgtctcgagcgccctgcagaccctgcccttgtttggggcaggagtagctgagctcacaaggcagcaaggcccgagcagctgagcagggccggggaactggccaagctgaggtgcccaggagaagaaagaggtgaccccagggcacaggagctacctgtgtggacaggactaacactcagaagcctgggggcctggctggctgagggcagttcgcagccaccctgaggagtctgaggtcctgagcactgccaggagggacaaaggagcctgtgaacccaggacaagcatggtcccacatccctgggcctgctgctgagaacctggccttcagtgtaccgcgtctaccctgggattcaggaaaaggcctggggtgacccggcaccccctgcagcttgtagccagccggggcgagtggcacgtttatttaacttttagtaaagtcaaggagaaatgcggtggaaaaaaaaaaaaa

SEQ ID NO: 233 - DNA, 1645 bp, Homo sapiens
agtcaagatggaggagtacgcgcgagagccttgcccatggcgaattgtggatgactgtggtggggcctttacgatgggtaccattggtggtggtatctttcaagcaatcaaaggttttcgcaattctccagtgggagtaaaccacagactacgagggagtttgacagctattaaaaccagggctccacagttaggaggtagctttgcagtttggggagggctgttttccatgattgactgtagtatggttcaagtcagaggaaaggaagatccctggaactccatcacaagtggtgccttaacgggagccatactggcagcaagaaatggaccagtggccatggttgggtcagccgcaatgggtggcattctcctagctttaattgaaggagctggtatcttgttgacaagatttgcctctgcacagtttcccaatggtcctcagtttgcagaagacccctcccagttgccttcaactcagttaccttcctcaccttttggagactatcgacaatatcagtaggacttctttcctaggatttctttaacagaacgagttgtggttcgagaaggatttcagaagatcaagttacagtctgtttttaaaaccataggtgggacagctatggccaataggctataaagagacatttagcacttttttctatttaaaggaacaagcggggaagggtgctaaaagataatacgtttatttattcacacttgaattgcatttgtgatcaaaataaatgtttaaatcgctaaaggaaaatacagtaagtgcttgaaagatgaaggaccaaaaggccaaaaaacagtgaaatatgatcatcatctcttgcggacttctctgcctggttttgtgtgttctgttattcaaacaataaaaagctggtggaacttactctttcttttaagataagttgtagacttcgatgtttcatgctcatgtacttcaaataatgcatgttttatagttagtccctcatcacttgaagtgacttctgagaattatgcagagtcaacatggatcatttcacagtgagatgctttatggattgaaggatatggtaaaatgtttatagtttactttgaaagtaaaatatactatgtcttggttttgaggatattggatacaaaactctcttcctttagggctactgagtcttgattcctgatcatcagaaatttcaccagaaacaacttgcttccaatatacccaattctatatgaagaattcatggagagtgtactggcactggaagagtttagtgtttcttgtatgcttgaaaataaagtatgtactgttttgaatgtgttccaagtcctctgcataaacgatgtattttggggtctggttgggcctggaaaatggatgagcacttcagaacaggtcattttcctgatattggaagtgacatgtggccctataggaggcatgatgttagttaattacacatttgcctacatctgtgggaaatggagaacaaagccatgtgggtactgtaaacacacgtttatcttttggcccaatgccatacatatggtaggcatttaattactgattgtgtttggataatttgggaattttcgactgtggtaaaatatacataaaataatacttattaaaaaaaaaaaaaaaaaa

SEQ ID NO: 234 - DNA, 1263 bp, Homo sapiens
ggcacgagaccttcagcgcctcggctccagcgccatggcgccctccaggaagttcttcgttgggggaaactggaagatgaacgggcggaagcagagtctgggggagctcatcggcactctgaacgcggccaaggtgccggccgacaccgaggtggtttgtgctccccctactgcctatatcgacttcgcccggcagaagctagatcccaagattgctgtggctgcgcagaactgctacaaagtgactaatggggcttttactggggagatcagccctggcatgatcaaagactgcggagccacgtgggtggtcctggggcactcagagagaaggcatgtctttggggagtcagatgagctgattgggcagaaagtggcccatgctctggcagagggactcggagtaatcgcctgcattggggagaagctagatgaaagggaagctggcatcactgagaaggttgttttcgagcagacaaaggtcatcgcagataacgtgaaggactggagcaaggtcgtcctggcctatgagcctgtgtgggccattggtactggcaagactgcaacaccccaacaggcccaggaagtacacgagaagctccgaggatggctgaagtccaacgtctctgatgcggtggctcagagcacccgtatcatttatggaggctctgtgactggggcaacctgcaaggagctggccagccagcctgatgtggatggcttccttgtgggtggtgcttccctcaagcccgaattcgtggacatcatcaatgccaaacaatgagccccatccatcttccctacccttcctgccaagccagggactaagcagcccagaagcccagtaactgccctttccctgcatatgcttctgatggtgtcatctgctccttcctgtggcctcatccaaactgtatcttcctttactgtttatatcttcaccctgtaatggttgggaccaggccaatcccttctccacttactataatggttggaactaaacgtcaccaaggtggcttctccttggctgagagatggaaggcgtggtgggatttgctcctgggttccctaggccctagtgagggcagaagagaaaccatcctctcccttcttacaccgtgaggccaagatcccctcagaaggcaggagtgctgccctctcccatggtgcccgtgcctctgtgctgtgtatgtgaaccacccatgtgagggaataaacctggcactaggaaaaaaaaaaaaaaaaaaaaaaaaaaaaaaaaaa

SEQ ID NO: 235 - DNA, 2855 bp, Homo sapiens
cgcccgggcaggtcggagacggaggaaaggtggcagccagattacttagagaggcacagaggagagagatcggggtgagtcgccatggggactcccagggcccagcacccgccgcctccccagctgctgttcctaattctgctgagctgtccctggatccagggtctgcccctgaaggaggaggagatattgccagagcctggaagtgagacccccacggtggcctctgaggccctggctgaactgcttcatggggccctgctgaggaggggcccagagatgggctacctgccagggcctccccttgggcctgagggaggagaggaggagacgacgaccaccatcatcaccacgacaactgttaccactacggtgaccagcccagttctgtgtaataacaacatctccgagggcgaagggtatgtggagtctccagatctggggagccccgtcagccgcaccctggggctcctggactgcacttacagcatccatgtctaccctggctacggcattgagatccaggtgcagacgctgaacctgtcacaggaagaggagctcctggtgctggctggtgggggatccccaggcctggccccccgactcctggccaactcatccatgcttggagaaggacaagtccttcggagcccaaccaaccggctgcttctgcacttccagagcccacgggtcccaaggggcggtggcttcaggatccactatcaggcctacctcctgagctgtggcttccctccccggccggcccatggggacgtgagtgtgacggacctgcaccctgggggcactgccacctttcactgtgattcgggctaccagctgcagggagaggagaccctcatctgcctcaatggcacccggccatcctggaacggtgaaacccccagctgcatggcatcctgtggtggcaccatccacaatgccaccctgggccgcatcgtgtccccagagcctgggggagccgtagggcccaacctcacctgccgttgggtcattgaagcagctgaggggcgccggctgcacctgcactttgaaagggtctcgctggatgaggacaatgaccggctgatggtgcgctcagggggcagccccctatcccccgtgatctatgattcggacatggacgatgtccccgagcggggtctcatcagtgacgcccagtccctctacgtggagctgctgtcagagacacctgccaatcccctgctgttaagccttcgatttgaagcctttgaggaggatcgctgcttcgcccccttcctggcacatggaaatgtcactaccacggaccctgagtatcgcccaggggcactggcaaccttctcgtgcctcccaggatatgccctggagccccctgggccccccaatgccatcgaatgtgtggatcccacagaaccccactggaacgacacagagccggcctgcaaagccatgtgtggaggggagctgtcggaaccagctggcgtggtcctctctcccgactggccccagagctatagcccgggccaagactgcgtgtggggcgtgcacgtccaggaagagaagcgcatcttgctccaagttgagatattgaatgtgcgggaaggggacatgctgacgctgttcgacggggacggtcccagcgcccgagtcttggcccagctgcggggacctcagccgcgccgccgccttctctcctctgggcccgacctcacactgcagtttcaggcaccgcccgggcccccaaatccaggcctgggccagggcttcgtattgcacttcaaagaggtcccgaggaacgacacgtgccccgagctgccacctccggagtggggctggagaacggcatcccacggggacctgatccggggcacggtgctcacctaccagtgcgagcctggctacgagctgctaggctccgacattctcacttgccagtgggacctgtcttggagcgccgcgccgcccgcctgccaaaagatcatgacttgtgctgaccctggcgagattgccaacgggcaccgcaccgcctcggacgccggcttccccgttggctcccacgtccagtaccgctgcctgccagggtacagcctcgagggggcagccatgctcacctgctacagccgggacacaggcacacccaagtggagcgatagggtccccaaatgcgccttgaagtacgagccgtgcctgaacccgggggttcccgagaatggctaccagacgctgtacaagcaccactaccaggcgggcgagtctctgcgcttcttctgctatgagggctttgagcttatcggcgaggtcaccatcacctgtgtgcccggccacccctcccagtggaccagccagcccccactctgcaaagttgcctatgaggagctcctggacaaccgaaaactggaagtgacccagaccacagatccatcacggcagctggaaggggggaacctggccctggccatcctgctgcctctaggcttggtcattgtcctcggcagtggcgtttacatctactacaccaagcttcagggaaagtcccttttcggcttctcgggctcccactcctacagccccatcaccgtggagtcggacttcagcaacccgctgtatgaagctggggatacgcgggagtatgaagtttccatctgaaccccaagactacagctgcaggacccaggacgcccctcccctcctcattcgggcagagggaaatacgggacccggtctctgcctcctggctgccctcctccctggctgtgtaaatagtctccctatcccacgagggggctttgatggccctggagatcctacagtaaataaaccagcatcctgccgcccaaaaaaaaaaaaaaaaaaaa

SEQ ID NO: 236 - DNA, 583 bp, Homo sapiens
cgctgcgccacatcccaccggcccttacactgtggtgtccagcagcatccggcttcatggggggacttgaaccctgcagcaggctcctgctcctgcctctcctgctggctgtaagtggtctccgtcctgtccaggcccaggcccagagcgattgcagttgctctacggtgagcccgggcgtgctggcagggatcgtgatgggagacctggtgctgacagtgctcattgccctggccgtgtacttcctgggccggctggtccctcgggggcgaggggctgcggaggcagcgacccggaaacagcgtatcactgagaccgagtcgccttatcaggagctccagggtcagaggtcggatgtctacagcgacctcaacacacagaggccgtattacaaatgagcccgaatcatgacagtcagcaacatgatacctggatccagccattcctgaagcccaccctgcacctcattccaactcctaccgcgatacagacccacagagtgccatccctgagagaccagaccgctccccaatactctcctaaaataaacatgaagcacaaaaacaaaaaaaaaaaaaaaaaa

SEQ ID NO: 237 - DNA, 2771 bp, Homo sapiens
gagtcgccgcttccgccttgaccaggtggagctggagacctggtctctctagggcctgccctgagctcaccatctgaaggagagtgccatcatccttaggaactccttctccagacatgcttcccgaggctggctccctgtggctactgaagctgctccgggacatccagttggcccagttttactggcccatcctagaggagcttaatgtcacccggccagggcacttcgactttgtaaagcctgaggacctggacggcattggcatgggccggcctgcccaacgcagactgtccgaagctctgaaaagcctacgttctgggcctaagtctaagaactgggtctacaagatccttggaggttttgcccctgagcacaaggagcccaccctgcccacggacagcccacggcacctccctgagccagaggggggcctcaagtgtctgatcccagagggtgctgtttgcagaggggagctgctgggttcaggctgcttcggtgtggtgcaccgagggctgtggacgctgcccagtggcaagagtgtcccagtggctgtcaagtccctccgggtaggtcccgaaggcccgatgggcacagaactgggggacttcctgcgagaggtatcggtcatgatgaacttggagcacccacacgtgctgcgtctgcacggccttgtactgggccagcctctgcagatggtgatggagctggcgccactgggctccctgcacgcgcgcttaacggccccggccccgacacccccgctgctcgtggccctgctctgcctcttcctgcggcagctggcgggagccatggcgtacctgggggcccgcgggctggtgcaccgagacctcgctacgcgcaacctacagctggcgtcgccgcgcaccatcaaggtggctgacttcgggctggtgcggcctctgggcggtgcccggggccgctacgtcatgggcgggccccgccctatcccctacacctggtgtgccccagagagcctgcgccacggagccttctcgtctgcctcggacgtgtggatgtttggggtgacgctgtgggagatgttctccgggggcgaggaaccctggcccggggtcccaccgtacctcatcctgcagcggctggaggacagagcccggctgcctaggcctcccccctcctccagggccctctactccctcgccttgcgctgctgggccccccaccctgccgaccggcctagcttttcccacctggaggggctgctgcaagaggccgggccttcggaagcatgttgtgtgagggatgccacagaaccaggcgccctgaggatggagactggtgaccccatcacagtcatcgagggcagctcctctttccacagccccgactccacaatctggaaggaccagaatggtcgcaccttcaaagtgggcagcttcccagcctcggcagtgacgctgacagatgcggggggcttgccagccacccgtccagtccacagaggcacccctgcccggggagatcaacacccaggaagcatagatggagacagaaagaaggcaaatctttgggatgcgcccccagcacggggccagaggaggaacatgcccctggagaggatgaaaggcatttccaggagtctggagtcagttctgtccctcggtcctcgtcccacagggggtggttcaagcccccctgaaattcgacaagccagagctgtgccccagggacctccaggcctgcctccacgcccacctttatcctctagctctcctcagcccagccagccctctagggagaggcttccctggcccgaaagaaaacccccacacaatcaccccatgggaatgcctggagcccgtaaagccgctgccctctctggaggcctcttgtccgatcctgagttgcagaggaagattatggaaatggagctgagtgtgcattgggtcacccaccaggagtgccagacagcactaggagccactgggggagatgtggcttctgccatccggaacctcaaggtagatcagctcttcctcctgagtagccggtccagagctgactgctggcgcatcctggagcattaccagtgggacctctcagctgccagccgttatgtcctggccaggccctgagcccagcttctgcgggcacagacaccagcatgaaaagcctaggtccctgagggcctggccacatgggaccaagtggaaccagaacaaggccccgacaggggtagacgttccacttgtggagatcccacctgccgctaggcacgtggaggaggagcccagagttgggcactggcaaatgtctcctccctcccatgctccttggcttctgaaggctgaagcccctttggctgggccaagaaggatctagtctgcccactacattctcaaacaagaggacttggaggaaaagagctactatacatcatatgcagaggaagcttctacgcgctagagaggatcaaggggccacactggaccatgtgaacagccatccggaactgccatcagctaccacactggactctgcagggcagccatcctggatgatggaagccaccatattgacctggggtataggcccaaactgccttcgtttggtccagggccatcgtgggtgatgacgattgctctcttgcactcatggacatttgatgctggtagtatggattatgagatggactagcccctgctccagcccagttctcacattcccctttgttttttcccataccaactgcttctaccctcccctattacatacatctttcaatgtcc

SEQ ID NO: 238 - DNA, 971 bp, Homo sapiens
cactcgttgcataaatttgcgctccgccagcccggagcatttaggggcggttggctttgttgggtgagcttgtttgtgtccctgtgggtggacgtggttggtgattggcaggatcctggtatccgctaacaggtcaaaatgcagatcttcgtgaaaacccttaccggcaagaccatcacccttgaggtggagcccagtgacaccatcgaaaatgtgaaggccaagatccaggataaggaaggcattccccccgaccagcagaggctcatctttgcaggcaagcagctggaagatggccgtactctttctgactacaacatccagaaggagtcgaccctgcacctggtcctgcgtctgagaggtggtatgcagatcttcgtgaagaccctgaccggcaagaccatcaccctggaagtggagcccagtgacaccatcgaaaatgtgaaggccaagatccaggataaagaaggcatccctcccgaccagcagaggctcatctttgcaggcaagcagctggaagatggccgcactctttctgactacaacatccagaaggagtcgaccctgcacctggtcctgcgtctgagaggtggtatgcagatcttcgtgaagaccctgaccggcaagaccatcactctggaggtggagcccagtgacaccatcgaaaatgtgaaggccaagatccaagataaagaaggcatcccccccgaccagcagaggctcatctttgcaggcaagcagctggaagatggccgcactctttctgactacaacatccagaaagagtcgaccctgcacctggtcctgcgcctgaggggtggctgttaattcttcagtcatggcattcgcagtgcccagtgatggcattactctgcactatagccatttgccccaacttaagtttagaaattacaagtttcagtaatagctgaacctgttcaaaatgttaataaaggtttcgttgcatggta

SEQ ID NO: 239 - DNA, 2669 bp, Homo sapiens
aaaagagtctcgccggcgtccccgcccgcacactcgcgcacactcgcgctcgggcgcacacggagcagggaccggcgcccggagcgagccagggagcggctaaccggggacccaccgcgcggagccagcctagctgccagcgagcccaacccgcgacgacccacgcccctgagccccgcagccgacccctgccggccggtgtccccaccgccatccctgacccatggcgctgaagaggattcagaaagaattgagtgatctacagcgcgatccacctgctcactgttcagctggacctgtgggagatgacttgttccactggcaagccactattatggggcctcctgatagcgcatatcaaggtggagtcttctttctcactgtacattttccgacagattatccttttaaaccaccaaagattgctttcacaacaaaaatttaccatccaaacataaacagtaatggaagtatttgtctcgatattctgaggtcacaatggtcaccagctctgactgtatcaaaagttttattgtccatatgttctctactttgtgatcctaatccagatgaccccttagtaccagatattgcacaaatctataaatcagacaaagaaaaatacaacagacatgcaagagaatggactcagaaatatgcaatgtaaaaatcaaaaacattttcatatataccagagtactgtaaaatctaggtttttttcaacattagcagtaaattgagcactgtttactgtttcattgtaccatgaaaccatttgatttttacccattttaaatgtgtttctgaagcaagacaaaacaaacttccaaaaatacccttaagactgtgatgagagcatttatcattttgtatgcattgagaaagacatttattatggtttttaagatacttggacatctgcatcttcagcttacaagatctacaatgcagctgaaaagcaaccaaattattttttgctgaaactagatgtttttacatgagaaatactgtatgtgttgtctaagatgtcagttttataaatctgtattcagatttcattctttgttagctcactttataatttgtatttttttactgtatagactaaatatattctatttacatgtatgtcaactcattacttttttcctgtgaacagtattgaaaaaccccaacggctgataattaagtgaattaactgtgtctcccttgtcttaggatattctgtagattgattgcagatttcttaaatctgaaatgatctttacactgtaattctcagcatactgattatggagaaacacttgttttgattttgttatacttgacttaactttattgcaatgtgaattaattgcactgctaagtaggaagatgtgtaacttttatttgttgctattcacatttgaattttttcctgtataggcaatattatattgacaccttttacagatcttactgtagctttttccatataaataaaatgctttttctactatttgtcttgattacttaaaaaaataaaaatataagtaaggatcaaaactctaaaattttgcatgaaaattacatccaaattgtgaaaatcagatctattttgtttgccattagtcaccattagttatataaattttattgttttaggttagtatctctttactaaattgtcagtctataagataatatatgttgatcccttgctgtagaggagaatttagagtaatttggggtttgtcttggattatatctaaatggattatttgttaaaagtactgaaatgagtataaggcagtatcacccatccaaaagaaaggtctttatagacctgcacagtcactagattaattcattaaaatgcccccaccctgatgtaattgacattacatttcttaacattttaaaatctagaatttctaaaatggaatttaatgccatcacaatttgaaaaactttttttttttttttactatagaagttacaaaggaagttctaaaattatgcctccctctgtttttataagttgccatcgaaaagtgatttaaataagcaggttatctttatagattttaaagaaaactagaaagttttaatgttttaacttggggaaaaatacatctctttaatgtttagcatgcttgtcaaccttgagtgagtgtcatttttaagaacagttgtagcccttctgattattgcagtagctgtagaagtatgtaagaatatgtgatgggtgtagtcattagcaaagcatttaaatcacttgagtattttgtcatggttcattattattaaagcacaaaataacctattgttagaaaatatgtgtttttataaatgaatgtaaaataattaaatgaattgtgaaatggatgtttaagaaaatataggcttaaaaagtaaatctataaaatgatgtcttaaaacagccatatcatgaaaaattctacttagctatattattataagctacatttgccctgaatttgaacactcaacatcactagatttaaatatttagtatattttgatagtaaagggttttgtttcttgaatatcttcactttaaacaaaaaaaaaaaacaactttcatttgtgtggcatttatttttggaagtgtcttcttttttttctttattaaagtttttgaaacttgcaaaaaaaaaaaaaaaaaa

SEQ ID NO: 240 - DNA, 2322 bp, Homo sapiens
gcgagcgaccgccatgcagctgacggtgaaggcgctgcagggccgcgagtgcagcctgcaggtgccagaggacgagctggtgtccacgctgaagcagctggtctccgagaagctgaacgtcccagtgcgccagcagcggctgctgttcaagggcaaggccctggcagatgggaaacgactctcggattatagcatcgggcccaactccaagctcaacctagtggtcaaacccctggagaaggtgctactagaagaaggcgaggcccagaggctggccgactccccacccccgcaggtctggcagctgatctccaaagtcttggcccgccacttcagtgcggcagatgccagcagggtcctggaacagctacagagggattacgagaggtccctgagtcgcctgacgctggacgacatcgaacggttggccagccgcttcctgcaccctgaagtgactgagacaatggagaagggcttctccaaatagaattctcggagcatggggaggtgcccaacgccaggctaccgctgcatgtcgcactaagtgtgttctcctgttgcagttgggctcatcatcgtcatagctggcatgtacctggctctggccaggtgctaggcactcctcacagcttgacctgggtttgcttccacaccctcagaagaggagagccggcacagcagaggcaccggcgatgaagtggcacagccccagtcggaatccagcggcttctgaaagtgccttggtgtgagaaggaggaaggggccgcttggagagctgggctctcgcatgtcatgtttagcccactgagaatataccctcaggtgactccctcccgatcctgaaagggaaagcagctgtcacctgacttctggcgggtccaacatagccctcagcttacctctgcaggaggccgagtgacagccagccctggaaccccccgacccccgcagctgctgcagccagtgtgccagtgtgcgttcgacaaatggaaaagcagattggggccagggagtcagcaaggcaccccagctctgtgatgtgactttgggcgagtctcagtgccacttggtccccagccatggactctatacagtgagggccactcaccgacctgagtcagtgtcctctgtctcacagggcccctctcccttctgttcagtaaacaaactgaagccaaaaatgaagccgtggccaagcgtgacccagagatggggtgtcctggcccttagtgacacagctcctctctggggcaccctatctgcttgtctcgtccaggaagcgttagggctgatgggtgactcagcaaggcagtgtcagagctgggactgggcgtaggcctttgtcctcatccccagcactggcctccctgtggaagatgaacatatcccagccacctgtgtacaggggctcactttgtgtgctccttgttgcctgagaagaaaccttggggtgccagggtgggggcagaagcatgggctgggttccggttcatcctcctccaccctgccgtgtgtgtgggcacaagaggacatctaaccacctgctccttggaggaggcccccaggggtggtagaggctggaaggaagccacatcaggaggacgccactccggcccttcacccttgccaagtgagctgctcacagtgtggtcagggctgcgcgtgctggaggccctcctgcctgggccttgtggggcaaatattgggtccccaggctggaaagatggacagaggcccaatgggtgaaggctttgaagagcacacagaagcccctggccccccacgagagctggagagccatgtatatggcttcaaagccacctacggcagggacacactcgtgagcatgtgtggcctgcagttcaggtgatacatttaccagtgttcttgtttgtgtggtgccaggaaattgattttggaaaaagtgaaataacattaaaggtgaatgtgaggcttctacttttatccaaaaggagctatattagctaggctgtttctgatatccaatcattggtttaacaataaaggcaatttgtttaatcagttaacggaaatttcttggcttatgaaagtgaaaagtccagtggtattggcattggcagcaggtgagcaatttcacccagtgtcttctgcctccctctgcgttggtatctgctacatcccaggccaccacctccgaggatgaaaagatggctgcctgcagcttccacggaatccctccctcactgccagagcagcatcttctctgtgtaccacctctgctgtctcagatgcccccagcaaataaacactcttctcgttggtcagaaaaaaaaaaaaaaa

SEQ ID NO: 241 - DNA, 2145 bp, Homo sapiens
atcttttttcatcttctagctgtagctcgggctgcttgtcggcttggctccccctcccccctttgctctctgcctcgtctttccccaggacttcgctattttgcttttttaaaaaaaggcaagaaagaactaaactcccccctccctctcctccagtcgggctgcacctctgccttgcactttgcacagaggtagagagcgcgcgagggagagagaggaaagaaaaaaaataataaagagagccaagcagaagaggaggcgagaagcatgaagtgttaactcccccgtgccaaggcccgcgccgcccggacagacgcccgccgcgccttccagccccgagcggacgccgcgcgccgccctgcctgcagcccgggccggcgacggcgagcccttccttatgcaaagcgcgccagcagcgcgaaggcgggacgccgcgcaccgggccgggctcctccagcttcgccgccgcagccaccaccgccgccaccgcagctcgcggaggatcttcccgagcctgaagccgccggctcggcgcgcaaggaggcgagcgcaaggaggggccggggcgagcgagggagcacattggcgtgagcaggggggagggagggcgggcgcggggggcgcgggcagggcgggggggtgtgtgtgtgagcgcgcttggaggtttcgggccagccaccgccgcgcaagctagaagcgccccagcccggcaagctggctcacccgctggccacccagcacagcccgctggcccctctcctgcagcccatctggcggagcggcggcggcggcggcggcggcaggagaatggcatcagaactggcaatgagcaactccgacctgcccaccagtcccctggccatggaatatgttaatgacttcgatctgatgaagtttgaagtgaaaaaggaaccggtggagaccgaccgcatcatcagccagtgcggccgtctcatcgccgggggctcgctgtcctccacccccatgagcacgccgtgcagctcggtgcccccttcccccagcttctcggcgcccagcccgggctcgggcagcgagcagaaggcgcacctggaagactactactggatgaccggctacccgcagcagctgaaccccgaggcgctgggcttcagccccgaggacgcggtcgaggcgctcatcagcaacagccaccagctccagggcggcttcgatggctacgcgcgcggggcgcagcagctggccgcggcggccggggccggtgccggcgcctccttgggcggcagcggcgaggagatgggccccgcggccgccgtggtgtccgccgtgatcgccgcggccgccgcgcagagcggcgcgggcccgcactaccaccaccaccaccaccacgccgccggccaccaccaccacccgacggccggcgcgcccggcgccgcgggcagcgcggccgcctcggccggtggcgctgggggcgcgggcggcggtggcccggccagcgctgggggcggcggcggcggcggcggcggcggaggcggcgggggcgcggcgggggcggggggcgccctgcacccgcaccacgccgccggcggcctgcacttcgacgaccgcttctccgacgagcagctggtgaccatgtctgtgcgcgagctgaaccggcagctgcgcggggtcagcaaggaggaggtgatccggctgaagcagaagaggcggaccctgaaaaaccgcggctatgcccagtcctgccgcttcaagagggtgcagcagagacacgtcctggagtcggagaagaaccagctgctgcagcaagtcgaccacctcaagcaggagatctccaggctggtgcgcgagagggacgcgtacaaggagaaatacgagaagttggtgagcagcggcttccgagaaaacggctcgagcagcgacaacccgtcctctcccgagtttttcataactgagcccactcgcaagttggagccatcagtgggatacgccacattttggaagccccagcatcgtgtacttaccagtgtgttcacaaaatgaaatttgtgtgagagctgtacattaaaaaaaacatcattattattattatttgcagtcatggagaaccacctacccctgacttctgtttagtctcctttttaaataatactgtgttagaaaaaaaaa

SEQ ID NO: 242 - DNA, 1806 bp, Homo sapiens
gccgctcgctcggctccgctccctggctcggctccctgcctccgcgtcgcagcccccgccgtagccgcctccgagcccgccgccacatcctctgagaagatggctgtgccacccacgtatgccgatcttggcaaatctgccagggatgtcttcaccaagggctatggatttggcttaataaagcttgatttgaaaacaaaatctgagaatggattggaatttacaagctcaggctcagccaacactgagaccaccaaagtgacgggcagtctggaaaccaagtacagatggactgagtacggcctgacgtttacagagaaatggaataccgacaatacactaggcaccgagattactgtggaagatcagcttgcacgtggactgaagctgaccttcgattcatccttctcacctaacactgggaaaaaaaatgctaaaatcaagacagggtacaagcgggagcacattaacctgggctgcgacatggatttcgacattgctgggccttccatccggggtgctctggtgctaggttacgagggctggctggccggctaccagatgaattttgagactgcaaaatcccgagtgacccagagcaactttgcagttggctacaagactgatgaattccagcttcacactaatgtgaatgacgggacagagtttggcggctccatttaccagaaagtgaacaagaagttggagaccgctgtcaatcttgcctggacagcaggaaacagtaacacgcgcttcggaatagcagccaagtatcagattgaccctgacgcctgcttctcggctaaagtgaacaactccagcctgataggtttaggatacactcagactctaaagccaggtattaaactgacactgtcagctcttctggatggcaagaacgtcaatgctggtggccacaagcttggtctaggactggaatttcaagcataaatgaatactgtacaattgtttaattttaaactattttgcagcatagctaccttcagaatttagtgtatcttttaatgttgtatgtctgggatgcaagtattgctaaatatgttagccctccaggttaaagttgattcagctttaagatgttacccttccagaggtacagaagaaacctatttccaaaaaaggtcctttcagtggtagactcggggagaacttggtggcccctttgagatgccaggtttcttttttatctagaaatggctgcaagtggaagcggataatatgtaggcactttgtaaattcatattgagtaaatgaatgaaattgtgatttcctgagaatcgaaccttggttccctaaccctaattgatgagaggctcgctgcttgatggtgtgtacaaactcacctgaatgggacttttttagacagatcttcatgacctgttcccaccccagttcatcatcatctcttttacaccaaaaggtctgcagggtgtggtaactgtttcttttgtgccattttggggtggagaaggtggatgtgatgaagccaataattcaggacttattccttcttgtgttgtgtttttttttggcccttgcaccagagtatgaaatagcttccaggagctccagctataagcttggaagtgtctgtgtgattgtaatcacatggtgacaacactcagaatctaaattggacttctgttgtattctcaccactcaatttgttttttagcagtttaatgggtacattttagagtcttccattttgttggaattagatcctccccttcaaatgctgtaattaacaacacttaaaaaacttgaataaaatattgaaacctc

SEQ ID NO: 243 - DNA, 1522 bp, Homo sapiens
ggttgcggcgggcggaacggtgtctccttcacttcgccctccagctgctgcagctgcagcccgaccgcgagcgtgccaagcggcttcagcagctagcggagcggtggcggcggcccccctcaggacaccaccagattcccctcttcccgcggcctcgccatggcgacccacggacagacttgcgcgcgtccaatgtgtattcctccatcatatgctgaccttggcaaagctgccagagatattttcaacaaaggatttggttttgggttggtgaaactggatgtgaaaacaaagtcttgcagtggcgtggaattttcaacgtccggttcatctaatacagacactggtaaagttactgggaccttggagaccaaatacaagtggtgtgagtatggtctgactttcacagaaaagtggaacactgataacactctgggaacagaaatcgcaattgaagaccagatttgtcaaggtttgaaactgacatttgatactaccttctcaccaaacacaggaaagaaaagtggtaaaatcaagtcttcttacaagagggagtgtataaaccttggttgtgatgttgactttgattttgctggacctgcaatccatggttcagctgtctttggttatgagggctggcttgctggctaccagatgacctttgacagtgccaaatcaaagctgacaaggaataactttgcagtgggctacaggactggggacttccagctacacactaatgtcaacgatgggacagaatttggaggatcaatttatcagaaagtttgtgaagatcttgacacttcagtaaaccttgcttggacatcaggtaccaactgcactcgttttggcattgcagctaaatatcagttggatcccactgcttccatttctgcaaaagtcaacaactctagcttaattggagtaggctatactcagactctgaggcctggtgtgaagcttacactctctgctctggtagatgggaagagcattaatgctggaggccacaaggttgggctcgccctggagttggaggcttaatccagctgaaagaaacctttgggaatggatatcagaagatttggccttaatatatttccattgtgaccagcagcaggcttttttcccccaagaagatgatcaaaacaaaggatgatctcaacaagagctgtattttaagtatttagacagttctttgttagctggtttctagttggttatctagttaccaatgctgcagtcctgcagtcacctatacattatttaaatgtatttaactgttaaatgcgctacccaccaataatgaaatagacctttatgaaaactgtgcaattgtgtgcatgtttgtttttatgttcctttagaaaacattgactgttaccattgaatgagatggatcagtggatattaagatgaggttacaaattttgttaagttcagccattattacttttggtatcccagaacatgacaaattatgaataaaacaagtatacataaaaaaaaaaaaaaaaaaaaa

SEQ ID NO: 244 - DNA, 2450 bp, Homo sapiens
aataggttagtttcagacaagcctgcttgccggagctcagcagacaccaggccttccgggcaggcctggcccaccgtgggcctcagagctgctgctggggcattcagaaccggctctccattggcattgggaccagagaccccgcaagtggcctgtttgcctggacatccacctgtacgtccccaggtttcgggaggcccaggggcgatgccagaccccgcggcgcacctgcccttcttctacggcagcatctcgcgtgccgaggccgaggagcacctgaagctggcgggcatggcggacgggctcttcctgctgcgccagtgcctgcgctcgctgggcggctatgtgctgtcgctcgtgcacgatgtgcgcttccaccactttcccatcgagcgccagctcaacggcacctacgccattgccggcggcaaagcgcactgtggaccggcagagctctgcgagttctactcgcgcgaccccgacgggctgccctgcaacctgcgcaagccgtgcaaccggccgtcgggcctcgagccgcagccgggggtcttcgactgcctgcgagacgccatggtgcgtgactacgtgcgccagacgtggaagctggagggcgaggccctggagcaggccatcatcagccaggccccgcaggtggagaagctcattgctacgacggcccacgagcggatgccctggtaccacagcagcctgacgcgtgaggaggccgagcgcaaactttactctggggcgcagaccgacggcaagttcctgctgaggccgcggaaggagcagggcacatacgccctgtccctcatctatgggaagacggtgtaccactacctcatcagccaagacaaggcgggcaagtactgcattcccgagggcaccaagtttgacacgctctggcagctggtggagtatctgaagctgaaggcggacgggctcatctactgcctgaaggaggcctgccccaacagcagtgccagcaacgcctcaggggctgctgctcccacactcccagcccacccatccacgttgactcatcctcagagacgaatcgacaccctcaactcagatggatacacccctgagccagcacgcataacgtccccagacaaaccgcggccgatgcccatggacacgagcgtgtatgagagcccctacagcgacccagaggagctcaaggacaagaagctcttcctgaagcgcgataacctcctcatagctgacattgaacttggctgcggcaactttggctcagtgcgccagggcgtgtaccgcatgcgcaagaagcagatcgacgtggccatcaaggtgctgaagcagggcacggagaaggcagacacggaagagatgatgcgcgaggcgcagatcatgcaccagctggacaacccctacatcgtgcggctcattggcgtctgccaggccgaggccctcatgctggtcatggagatggctgggggcgggccgctgcacaagttcctggtcggcaagagggaggagatccctgtgagcaatgtggccgagctgctgcaccaggtgtccatggggatgaagtacctggaggagaagaactttgtgcaccgtgacctggcggcccgcaacgtcctgctggttaaccggcactacgccaagatcagcgactttggcctctccaaagcactgggtgccgacgacagctactacactgcccgctcagcagggaagtggccgctcaagtggtacgcacccgaatgcatcaacttccgcaagttctccagccgcagcgatgtctggagctatggggtcaccatgtgggaggccttgtcctacggccagaagccctacaagaagatgaaagggccggaggtcatggccttcatcgagcagggcaagcggatggagtgcccaccagagtgtccacccgaactgtacgcactcatgagtgactgctggatctacaagtgggaggatcgccccgacttcctgaccgtggagcagcgcatgcgagcctgttactacagcctggccagcaaggtggaagggcccccaggcagcacacagaaggctgaggctgcctgtgcctgagctcccgctgcccaggggagccctccacgccggctcttccccaccctcagccccaccccaggtcctgcagtctggctgagccctgcttggttgtctccacacacagctgggctgtggtagggggtgtctcaggccacaccggccttgcattgcctgcctggccccctgtcctctctggctggggagcagggaggtccgggagggtgcggctgtgcagcctgtcctgggctggtggctcccggagggccctgagctgagggcattgcttacacggatgccttcccctgggccctgacattggagcctgggcatcctcaggtggtcaggcgtagatcaccagaataaacccagcttccctcttgaaaaaaaaaaaaaaaaaaaaa

SEQ ID NO: 245 - DNA, 3839 bp, Homo sapiens
caggtctcgacttcactgctctgtgtcctctgctccaggaggcccagcctgtgtggccctgtgacctgcaggtattggaagagccacagctaagatgccaggaacccctggaagcctagaaatgggactgttgacatttagggatgtggccatagaattctctccggaggagtggcaatgtctggacactgcacagcagaatttatataggaatgtgatgttagagaactacagaaacctggccttcctgggtattgctctctctaagccagacctgattacttatctggagcaaggaaaagagccctggaatatgaagcaacatgagatggtggatgaacccacaggtatatgtcctcattttcctcaagacttttggccagagcagagcatggaagattcttttcaaaaagtattactgagaaaatatgaaaaatgtggacatgagaatttacagttaagaaaaggttgtaaaagtgtggatgagtgtaaggtgcacaaagaaggttataataaacttaaccagtgtctcacaactgcccagagcaaagtatttcaatgtgggaaatatttgaaagtcttctataaatttttaaattcaaacagacatacgataagacataccggaaagaaatgcttcaaatgtaaaaaatgtgtcaagtcattttgcatccgtttacacaaaacccaacataaatgcgtttatattacagagaagtcctgtaaatgtaaagaatgtgaaaaaacctttcattggtcctcaacccttactaatcataaggaaattcatactgaagataaaccctacaaatgtgaagaatgtggcaaagcttttaagcagctctcaacccttactacacataaaataatctgtgctaaagagaaaatctacaagtgtgaagaatgtggcaaagcatttctatggtcctcaaccctaactagacataagaggatacacactggagagaaaccctacaaatgtgaagaatgtggcaaagcttttagccattcttcaacccttgctaaacataagagaattcatactggagagaaaccctacaaatgtgaagaatgtggcaaagcttttagccattcttcagcccttgctaaacataagagaattcatactggagagaaaccctacaaatgtaaagaatgtggcaaagcttttagcaattcctcaacccttgctaatcataagataactcatactgaagagaaaccctacaaatgtaaagaatgtgacaaaacttttaagcgactctcaacccttactaaacataaaataatacatgctggagagaaactctacaaatgtgaagaatgtggcaaagcttttaatcgatcttcaaatcttactatacataagtttattcatactggagagaaaccttacaagtgtgaagaatgtggcaaagcatttaactggtcctcaagccttactaaacataaaagatttcatactagagagaaacccttcaaatgtaaagaatgtggcaaaggatttatatggtcttcaaccctaactagacataagaggatacacactggagagaagccctacaaatgtgaagaatgtggcaaagcttttaggcaatcctcaacccttactaaacataagataattcatactggagagaaaccctacaaatttgaagaatgtggcaaagcttttagacaatccttaacccttaataaacataagataattcatagtagagagaaaccctacaaatgtaaagaatgtggcaaagcttttaagcaattctcaacccttactacacataaaataattcatgctggaaagaaactctacaaatgtgaagaatgtggcaaagcttttaatcattcctcaagtctttctacacataagataattcatactggagagaagtcttacaagtgtgaagaatgtggcaaagcatttctatggtcctcaaccctaagaagacataagaggatacacactggagagaaaccctacaaatgtgaagaatgtggcaaagcttttagccattcttcagcccttgctaaacataagagaattcatactggagagaaaccctacaaatgtaaagaatgtggcaaagcttttagcaattcctcaacccttgctaatcataagataactcatactgaagagaaaccctacaaatgtaaagaatgtgacaaaacttttaagcgactctcaacccttactaaacataaaataatacatgctggagagaaactctacaaatgtgaagaatgtggcaaagcttttaatcgatcttcaaatcttactatacataagtttattcatactggagagaaaccttacaagtgtgaagaatgtggcaaagcatttaactggtcctcaagccttactaaacataaaagaattcatactagagagaaacccttcaaatgtaaagaatgtggcaaagcatttatatggtcttcaaccctaactagacataagaggatacacactggagagaagccctacaaatgtgaagaatgtggcaaagcttttagccgttcctcaacccttactaagcataagacaattcatactggagagaaaccctacaaatgtaaagaatgtggcaaagcttttaagcactcctcagcccttgctaaacataaaataatacatgctggagagaaactctacaaatgtgaggaatgtggcaaagcttttaatcaatcttcaaatcttacgacacataagataattcatactaaagagaaaccttccaagagtgaagaatgtgacaaagcatttatctggtcctcaacccttactgaacataagagaattcataccagagagaaaccctacaaatgtgaagaatgtggcaaagcatttagccagccttcacaccttactacacataagaggatgcacactggagagaaaccctacaaatgtgaagaatgtggcaaagcttttagccaatcctcaacccttactacacataagataattcatactggagagaaaccctacaaatgtgaagaatgtggcaaagcttttaggaaatcttcaactcttactgaacataagataattcatactggagagaaaccctacaaatgtgaagaatgtggcaaagcatttagccaatcctcaaccctaactagacatacgaggatgcacactggagagaaaccatacaaatgtgaagaatgtgggaaagcttttaatcgatcctcaaagcttactacacataagataattcatactggagagaaaccttacaagtgtgaagaatgtggcaaagcatttatatcatcctcaaccctaaatggacataagagaattcatactagagagaaaccctacaaatgtgaagaatgtggcaaagcatttagccaatcttcaaccctaactagacataagaggttgcacaccggagagaaaccctacaaatgtggagaatgtggcaaagcctttaaagagtcctcagctcttactaaacataagataattcacactggagagaaaccctacaaatgtgaaaaatgttgcaaagcctttaaccagtcttcaatccttactaaccataagaaaattcatactatcacacctgtaatcccactactttgggaggccgaggcgggcggatcacgaggtcaggagatggagaccatcctggctaacacagtgaaaccccttctctactaaaaaatacaaaaaactagccgggcgtggtggcgggcgcctgtagtcccagctatgcgagaggctgaggcaggagaatggcgtgaacccgggaggcggagcttgcagtgagccgagatcacgccactgcactcaagcctgggcgacagagcgagactccgtctcaaaaaaa

SEQ ID NO: 246 - DNA, 2374 bp, Homo sapiens
gggcgatgagagcgggtactgcgaactgccgggcgatgctgtcgctgccgccgtgatacggagagcaacagttccccagcaacacccctccccgacacaggcacacaccccccgacaggcacgcacacccaccccacagtgcccggctcggctgcgcctcctctattggcccaggaagcccacccagccccgccacgcagagcccagaaggaaagaaagcctcatgcctgagccgaggggagcaccatggatctgacaaaaatgggcatgatccagctgcagaaccctagccaccccacggggctactgtgcaaggccaaccagatgcggctggccgggactttgtgcgatgtggtcatcatggtggacagccaggagttccacgcccaccggacggtgctggcctgcaccagcaagatgtttgagatcctcttccaccgcaatagtcaacactatactttggacttcctctcgccaaagaccttccagcagattctggagtatgcatatacagccacgctgcaagccaaggcggaggacctggatgacctgctgtatgcggccgagatcctggagatcgagtacctggaggaacagtgcctgaagatgctggagaccatccaggcctcagacgacaatgacacggaggccaccatggccgatggcggggccgaggaagaagaggaccgcaaggctcggtacctcaagaacatcttcatctcgaagcattccagcgaggagagtgggtatgccagtgtggctggacagagcctccctgggcccatggtggaccagagcccttcagtctccacttcatttggtctttcagccatgagtcccaccaaggctgcagtggacagtttgatgaccataggacagtctctcctgcagggaactcttcagccacctgcagggcccgaggagccaactctggctgggggtgggcggcaccctggggtggctgaggtgaagacggagatgatgcaggtggatgaggtgcccagccaggacagccctggggcagccgagtccagcatctcaggagggatgggggacaaggttgaggaaagaggcaaagaggggcctgggaccccgactcgaagcagcgtcatcaccagtgctagggagctacactatgggcgagaggagagtgccgagcaggtgccacccccagctgaggctggccaggcccccactggccgacctgagcacccagcacccccgcctgagaagcatctgggcatctactccgtgttgcccaaccacaaggctgacgctgtattgagcatgccgtcttccgtgacctctggcctccacgtgcagcctgccctggctgtctccatggacttcagcacctatggggggctgctgccccagggcttcatccagagggagctgttcagcaagctgggggagctggctgtgggcatgaagtcagagagccggaccatcggagagcagtgcagcgtgtgtggggtcgagcttcctgataacgaggctgtggagcagcacaggaagctgcacagtgggatgaagacgtacgggtgcgagctctgcgggaagcggttcctggatagtttgcggctgagaatgcacttactggctcattcagcgggtgccaaagcctttgtctgtgatcagtgcggtgcacagttttcgaaggaggatgccctggagacacacaggcagacccatactggcactgacatggccgtcttctgtctgctgtgtgggaagcgcttccaggcgcagagcgcactgcagcagcacatggaggtccacgcgggcgtgcgcagctacatctgcagtgagtgcaaccgcaccttccccagccacacggctctcaaacgccacctgcgctcacatacaggcgaccacccctacgagtgtgagttctgtggcagctgcttccgggatgagagcacactcaagagccacaaacgcatccacacgggtgagaaaccctacgagtgcaatggctgtggcaagaagttcagcctcaagcatcagctggagacgcactatagggtgcacacaggtgagaagccctttgagtgtaagctctgccaccagcgctcccgggactactcggccatgatcaagcacctgagaacgcacaacggcgcctcgccctaccagtgcaccatctgcacagagtactgccccagcctctcctccatgcagaagcacatgaagggccacaagcccgaggagatcccgcccgactggaggatagagaagacgtacctctacctgtgctatgtgtgaagggaggcccgcggcggtggagccgagcggggagccaggaaagaagagttggagtgagatgaaggaaggactatgacaaataaaaaaaaaaaaaaaaaaaaaaaaa

SEQ ID NO: 247 - DNA, 2347 bp, Homo sapiens
agagagagagagagagagagagagagagagagagagagagagagagagagagagagagagagaggaacgaggccgtcgcatctttgtgtctgcttcctgtgggacgtggtggtagccgttgggttgggaaagtgagggatttttggcctcgtttctcctgcttcttttctcctcccttttactttgccggtagaacacagttatgggtcgcaagaagaagaagcagctgaagccgtggtgctggtattgtaatagagattttgatgatgagaagatccttattcagcaccaaaaagcaaagcattttaaatgccatatatgtcacaagaaattgtatacaggacctggcttagctattcattgcatgcaggtacataaagaaacaatagatgccgtaccaaatgcaatacctggaagaacagacatagagttggaaatatatggtatggaaggtattccagaaaaagacatggatgaaagacgacgacttcttgaacagaaaacacaagaaagtcaaaaaaagaagcaacaagatgattctgatgaatatgatgatgacgactctgcagcctcaacttcatttcagccacagcctgttcaacctcagcaaggttatattcctccaatggcacagccaggactgccaccagtaccaggagcaccaggaatgcctccaggcatacctccattaatgccaggtgttcctcctctgatgccaggaatgccaccagttatgccaggcatgccacctggaatgatgccaatgggtggaatgatgccacctggaccaggaataccacctctgatgcctggaatgccaccaggtatgcccccacctgttccacgtcctggaattcctccaatgactcaagcacaggctgtttcagcgccaggtattcttaatagaccacctgcaccaacagcaactgtacctgccccacagcctccagttactaagcctcttttccccagtgctggacagatggggacacctgtcacaagctcaagtacagcttcatccaattcagaaagtctgtctgcatcttctaaagctctgtttcctagcacagcacaagctcaggcagctgtccaaggacctgttggtacagatttcaaacccttaaatagtacccctgcaacaactacagaacccccaaagcctacattccctgcttatacacagtctacagcttcaacaactagtacaacaaatagtactgcagctaaaccagcggcttcaataacaagtaagcctgctacacttacaacaactagtgcaaccagtaagttgatccatccagatgaggatatatccctggaagagagaagggcacagttacctaagtatcaacgtaatcttcctcggccaggacaggcccccatcggtaatccaccagttggaccaattggaggtatgatgccaccacagccaggcatcccacagcaacaaggaatgagacccccaatgccacctcatggtcagtatggtggtcatcatcaaggcatgccaggataccttcctggtgctatgcccccgtatgggcagggaccgccaatggtgcccccttaccagggtgggcctcctcgacctccgatgggaatgagacctcctgtaatgtcgcaaggtggccgttactgatcttacttcatccagtctaataggtttggagattaaaccttttctcaacttgtgctgtttatatagccaagcttccgtcaataaggcttcattgtgactttaacaaacattatcttcccacataccaggaactattggacatttattttacatgggaaaaattatttggaataataaagcaggaacttttcctgaagttgcaatttatactgtatggcttctttttcatgtttcatctaggtttttagaagtgaagtatagtaaatttggttcgttaaattgtgaaggcgctggaattacatgaacataccaccctagtaaaggcaagttctgtaagcttacattgctatttgtaaagtttgccttcacagcatttcagatgctgttggacttcatgtccccaacctagcttggtgagggctgtaactgtttccaagtacttgtacattggaagtctgaatgtgtaacaatatttaatgtatttagagttcctcatgttgcagggtttaagaaatctgacccaccaaggtcatgtgacttttctgtactgttaaacttcattgtaataaaatgagagaaaaatttatgcctttttattcataacccagctgtggaccactgcctgaaaggtttgtacagatgcatgccacagtagatgtccacataataaaattcatagttaccaatgcaataaaaaaaaaaaaaaaa

SEQ ID NO: 248 - DNA, 2386 bp, Homo sapiens
ctagtcccgattatggttattacagtttgatgaaatgtggctgagatcattggcactgtggagattaagaaatgtgaggtcagagtgttgggtaaattgttcctgcgagtgttaaggttgtcaggataatggtgggaatggggtgaagatgacaactcagcaatgacacaagaagagagtgacacagaaagattcagtagctgagaacttgagcgtagatatgttgtgggcaggagggaaatgatttggatggaagtagccaagtaagtgagaaaggaaagactttccaacaaaacttggcttagctcactcagatccctgagctgcaaacttcttctatacctttcttaccttttccagtgctgctgacttcaccccacttgcagggcatttgtgcagatggttgtttgttgaggaggaatgtgcttaatgttttaggaaccagttacattcaaggatgcctctgtggccttcaccgaggaggagtgaggtcacctggactctgctcccaggaagctgtgcggagctgtgatgctgggcaactacagaaacttggtcttggagacttgaatgaaaattctgtggagaatcttcagcagaaaacacttcaggatctgttacatgagctttcctcctggctagttttggaaggcatggccagtacaattactggaagtcaggattgtattgtgaatcatcgaggggaagtggatggggagcctgaactagatatttccccttgtcaacagtggggagaagcatcttctcctatttccagaaacagggacagtgtgatgactcttcaaagtggttgtttcgaaaacattgaaagtgaaacatatttgcctttgaaagtctcaagccaaatagacacacaagactcttcagtgaagttctgtaagaatgagcctcaggatcatcaggaaagcagacgtctctttgtaatggaagaaagcactgagagaaaagtgataaagggggaaagttgttcagagaaccttcaagttaaactggtgtctgatggacaagaactggcctcgccattgttaaatggtgaggcaacttgccagaatggccagttaaaagaatctttggatcccattgactgtaactgcaaagacattcatggatggaaatcacaggtggtcagttgtagtcagcagagaggtcatacagaggagaaaccctgtgaccataataactgtgggaaaatacttaacaccagcccagatggtcatccatatgagaaaatccacactgcagagaaacaatacgaaggtagtcagtgtggtaagaacttcagtcaaagctcagagctactacttcatcagagagaccacacagaagaaaaaccctacaaatgtgagcaatgtgggaagggcttcacaaggagctcgagtctgcttatccatcaggcagtccacacagatgagaagccttataagtgtgagaagtgtgggaagggcttcaccaggagctcaagtctgctcatccatcatgccgtccatacaggcgaaaaaccttataaatgtgacaagtgtgggaagggctttagtcagagctccaaactgcacatccaccagcgagtccacactggagagaagccctatgagtgtgaggagtgtggtatgagcttcagtcagcgctcaaacctgcacatccaccagcgagatcacacaggagagaggccctacaagtgtggtgagtgtgggaagggcttcagtcagagctcgaaccttcacattcaccggtgcatccacacaggagagaagccttaccaatgctatgagtgtgggaagggtttcagccagagctcggatcttcgcatccatctcagagtccacactggagagaagccctatcactgtggcaagtgtgggaagggatttagccagagttccaaactcctcatccaccagagagtacatactggagagaagccctatgagtgcagcaagtgtgggaagggcttcagccagagctccaaccttcacagccaccagcgggttcacaagaaagatcctcgctaactgacattagcccattcaggtcttcacagcgctcatactgtaaaaactgttaaatatttagtatcactcttactttatattcctacaaaggagagagatgtaagggttatttagatatgttccctcactgaaaaatcactcattcaaaatatttaagtatcaagcactttgttatgctgtacaatgaatggattgttcttgtttctcagatgggtagagtaaaagtgtctgtactttacaattcaactacttgttctacccagcatttaacggcaagaactttatatttattctcaagcagggcatgtttccctttgttcacattctctgagaaattgaaactctggtttctcttc

SEQ ID NO: 249 - DNA, 3103 bp, Homo sapiens
ctgtgacactgccagcagcgcgcagagggagggatgggggcgggtatcggcgtaggggccctcggaaagaacggatattgctgtgacaccgcggggacgctctgaagggacgagtgtcggtgtggcaccggtgcacgctgaaggagccggcggaaccgggtggccatggggatgtgggcatcgctggacgctttgtgggagatgccggccgagaagcgtatcttcggggccgtgctgctcttttcctggacagtgtatctttgggagaccttcctagcacagcggcagagaaggatatataaaacaacaactcatgtaccaccggagttaggacagatcatggattctgaaacatttgagaaatctcgactctatcaactggataaaagcactttcagcttctggtcaggactctattcagagactgaaggcactcttattcttctctttggaggaataccttatctctggagactttctggacggttctgtggttatgctggctttggaccagaatatgagatcactcagtccctggtgtttctgctgttggctacacttttcagtgcattgactggtttgccatggagtctttataatacttttgtgatagaagaaaaacatggcttcaatcaacagactttggggttcttcatgaaagatgcaatcaagaaatttgttgtgactcagtgtattttgttgcctgtgtcttcacttctactttacattattaaaattgggggtgactatttttttatttatgcctggctgttcacattagttgtgtctctggttcttgtcacaatctatgctgattatattgcccctttatttgacaaattcacacctctgcctgagggaaagcttaaagaagaaattgaagtaatggcaaagagtattgactttcctttgacgaaggtgtatgttgtggaaggatctaaacgctcttcccacagcaatgcttatttttatggcttcttcaagaacaagcgaatagttttgtttgacactctactagaagagtactctgtactaaacaaagacatccaggaggattctggcatggaaccccgcaatgaggaagaagggaacagtgaagaaataaaagctaaagttaaaaataagaaacaaggatgtaaaaatgaggaggtactcgctgtactaggccatgaactggggcactggaagttgggacatacagtcaaaaatatcattattagccagatgaattctttcctgtgtttttttttatttgctgtattaattggtcgaaaggagctttttgctgcatttggtttttatgatagccaacccactcttattggactattgatcatcttccagtttattttttcaccttacaatgaggttctttctttttgcctaacagtcctaagccgcagatttgagtttcaagctgatgcatttgccaagaaacttgggaaggctaaagacttatattctgctttaatcaaacttaacaaagataacttgggattccctgtttctgactggttgttctcaatgtggcattattctcatcctccactgctagagagacttcaagctttgaaaactatgaagcaacactgagatgtccaggatctgtgactgaagacatttctgattatttctgtcctggcagcatgttccagctcttgatgtttttaaacttttttttagaagaaaaattaagtacagaaaagcccagatttaaatacatttaatatgtcattttaaaaatgattttaataattcatttcttaaaacactgaatgaattttgaagcttaatgtttttaaaggcatagttttatctttgacatctaatttaccatcaagttgtaaaattatttggaaaaatacagaactcgttttatttgtatacttatatggaatctgcatgtgaggtgtttgagggcatatgtttgaaagagggagcatcaccacaggaatcctttctgtgaggtggaaacagtggtcctgaatcattgtgctcacacctaacttgaaatctggtcttactttcatgctgttatgatttcacctggtgaatcagtgttttaaataagaaaggtaatagttggtaaggccaatgttatttaaatgaaagtagttagaaaaatgctctcctattctaccaaatttttaatttctttcttccctttcttgctacacagtgatcaagagtttctcatagtgctttgaagttagaaattatgtataggatattttaaatcattgagttttgtggggtttttttgtttgtttgtttcttttgttttttggaaaatccgtgtctttatctttttttcccacgtggtagatatgatcccattggaggtaaattgtagcttcttctcattcatgcagtaaataatacatcctttcactcagcagagatggccatattaaacacgttttgctatgttaaaagtggcagaacaggaaagacgaattaaaaataacattttttaagcgacataaggatgaaatactgatgaatctctgtgacattacagggaaaaaaatatagttttctatctctttcaagggcagaagagttttcatttttatttttgtaattttatctgtaagtcataaatattacttaatcaggcctgattctacttttgaaaattacagttcttgaaatgcagataatgtttactttgaaaacaaatgtcatgaatgatttccagtttttaaagctatatgtttcactgcttcatatctctgtccactttctgaatgagaacttattttgtgcctagagctctcactcactgataatgcttattaccttctgggcatttattccaaagtgggatcaactgtacgcctttggtatctgaccataaagtcttttgctccgctgacatttgggtgatgtcttcacatggaaatataataaaaataaaaatctagtttaatactgcattatttattttcctaaggctaaagaggagcagtcctatgcttttattcagcatcctttatctgtgacttcatgctctgataactgcctttccttccttctgtgcctttgaatacaaatttcagttctgcaaaagtgaaacattaaacattgccaacgcaaatgt

What is claimed is:

1. A method for diagnosing schizophrenia in an individual, which method comprises:
(a) obtaining a cell or tissue sample from a first individual suspected of having schizophrenia;
(b) determining levels of expression of at least one nucleic acid in the cell or tissue sample, said nucleic acid being a nucleic acid of SEQ ID NOS: 1-249; and
(c) comparing said levels of expression to levels of expression of the nucleic acid from a sample of a second individual who does not have schizophrenia;
wherein a difference in the levels of expression of the nucleic acid in the cell or tissue sample obtained from the first individual, relative to the levels of expression in the second individual, indicates that the first individual has schizophrenia.

2. A method of claim 1, wherein the levels of expression of a plurality of nucleic acids in the cell or tissue sample are determined, said plurality of nucleic acids selected from the group consisting of SEQ ID NOS: 1-249.

3. A method for identifying a compound to treat schizophrenia, which method comprises:
(a) contacting a cell or tissue sample with a test compound;
(b) determining expression, in the cell or tissue sample, of at least one nucleic acid selected from the nucleic acids of SEQ ID NOS: 1-249; and
(c) comparing the determined expression to expression of the nucleic acid in a cell or tissue sample that is not contacted with the test compound,
wherein a difference in expression of the nucleic acid when the cell or tissue sample is contacted with the test compound indicates that the test compound can be used to treat schizophrenia.

4. A method of claim 3, wherein the levels of expression of a plurality of nucleic acids in the cell or tissue sample are determined, said plurality of nucleic acids are selected from the group consisting of SEQ ID NOS: 1-249.

5. A method of claim 4, wherein the levels of expression of at least fourteen nucleic acids in the cell or tissue sample are determined, said nucleic acids are selected from the group consisting of SEQ ID NOS: 1-249.

6. A method of claim 4, wherein the levels of expression of at least twenty-eight nucleic acids in the cell or tissue sample are determined, said nucleic acids are selected from the group consisting of SEQ ID NOS: 1-249.

7. A method of claim 4, wherein the levels of expression of at least forty-two nucleic acids in the cell or tissue sample are determined, said nucleic acids are selected from the group consisting of SEQ ID NOS: 1-249.

8. A kit for diagnosing schizophrenia in an individual, said kit comprising:
a plurality of nucleic acid probes, wherein each of said probes specifically hybridizes to a nucleic acid selected from the group consisting of SEQ ID NOS: 1-249.

9. A kit for diagnosing schizophrenia in an individual, said kit comprising:
a plurality of primer pairs, wherein each of said primer pair specifically amplifies a nucleic acid selected from the group consist of SEQ ID NOS: 1-249.

10. A method for monitoring a therapeutic response in an individual undergoing treatment for schizophrenia, said method comprising:
(a) determining expression, in the cell or tissue sample, from said individual of at least one nucleic acid selected from the nucleic acids of SEQ ID NOS: 1-249; and
(b) comparing the determined expression to the expression of the nucleic acid in a cell or tissue sample, from a individual who does not have schizophrenia
wherein a similar level of expression of the nucleic acid in the cell or tissue sample obtained from the individual undergoing treatment for schizophrenia relative to the level of expression of the nucleic acid in the cell or tissue sample obtained from the individual who does not have schizophrenia indicates a therapeutic response.
